United States Patent Application Publication US 2022/0064268 A1 - sequence listing, part 2

SEQ ID NO: 24740 - protein, 16 aa, Homo sapiens
  Heavy chain CDR3 for antibody 12370 (IGHV3-33)
ARPTYYDILTGYPFDY

SEQ ID NO: 24741 - protein, 11 aa, Homo sapiens
  Light chain CDR3 for antibody 12371 (IGKV3-11)
QQRSNWPPTWT

SEQ ID NO: 24742 - protein, 11 aa, Homo sapiens
  Heavy chain CDR3 for antibody 12371 (IGHV4-59)
VRERGYYGMDV

SEQ ID NO: 24743 - protein, 9 aa, Homo sapiens
  Light chain CDR3 for antibody 12372 (IGKV1-6)
LQDYKSPFT

SEQ ID NO: 24744 - protein, 17 aa, Homo sapiens
  Heavy chain CDR3 for antibody 12372 (IGHV3-13)
AREGWFGELWGYYGMDV

SEQ ID NO: 24745 - protein, 9 aa, Homo sapiens
  Light chain CDR3 for antibody 12373 (IGKV1D-16)
QQYNSYPLT

SEQ ID NO: 24746 - protein, 11 aa, Homo sapiens
  Heavy chain CDR3 for antibody 12373 (IGHV4-59)
AREMGHDPFDI

SEQ ID NO: 24747 - protein, 8 aa, Homo sapiens
  Light chain CDR3 for antibody 12374 (IGKV1D-13)
QQFNTYYT

SEQ ID NO: 24748 - protein, 16 aa, Homo sapiens
  Heavy chain CDR3 for antibody 12374 (IGHV4-59)
ARYSGSYYGDYYGMDV

SEQ ID NO: 24749 - protein, 9 aa, Homo sapiens
  Light chain CDR3 for antibody 12375 (IGKV1-17)
LHSNNYPWT

SEQ ID NO: 24750 - protein, 14 aa, Homo sapiens
  Heavy chain CDR3 for antibody 12375 (IGHV3-23)
AKSRIVGALYYFDY

SEQ ID NO: 24751 - protein, 10 aa, Homo sapiens
  Light chain CDR3 for antibody 12376 (IGKV3-11)
QQRSNWPALT

SEQ ID NO: 24752 - protein, 10 aa, Homo sapiens
  Heavy chain CDR3 for antibody 12376 (IGHV3-23)
ARDNFEGMDV

SEQ ID NO: 24753 - protein, 9 aa, Homo sapiens
  Light chain CDR3 for antibody 12377 (IGKV5-2)
LQHDKFPYT

SEQ ID NO: 24754 - protein, 14 aa, Homo sapiens
  Heavy chain CDR3 for antibody 12377 (IGHV3-33)
ARKPDYYGSGYFDY

SEQ ID NO: 24755 - protein, 11 aa, Homo sapiens
  Light chain CDR3 for antibody 12378 (IGKV1-6)
QQRSNWPPTWT

SEQ ID NO: 24756 - protein, 11 aa, Homo sapiens
  Heavy chain CDR3 for antibody 12378 (IGHV4-4)
AREAYYYGLDV

SEQ ID NO: 24757 - protein, 9 aa, Homo sapiens
  Light chain CDR3 for antibody 12379 (IGKV3-11)
QQRSNWPPT

SEQ ID NO: 24758 - protein, 14 aa, Homo sapiens
  Heavy chain CDR3 for antibody 12379 (IGHV3-33)
ARDYGSGSYSPFDY

SEQ ID NO: 24759 - protein, 9 aa, Homo sapiens
  Light chain CDR3 for antibody 12380 (IGKV3-15)
QQYSNWPRT

SEQ ID NO: 24760 - protein, 12 aa, Homo sapiens
  Heavy chain CDR3 for antibody 12380 (IGHV1-18)
ARRDGSGTSFDY

SEQ ID NO: 24761 - protein, 7 aa, Homo sapiens
  Light chain CDR3 for antibody 12381 (IGKV3-11)
QQRSKFT

SEQ ID NO: 24762 - protein, 20 aa, Homo sapiens
  Heavy chain CDR3 for antibody 12381 (IGHV1-46)
ARDLCSSTSCYGYYYYGMDV

SEQ ID NO: 24763 - protein, 9 aa, Homo sapiens
  Light chain CDR3 for antibody 12382 (IGKV1-37)
QRTYNAPFT

SEQ ID NO: 24764 - protein, 12 aa, Homo sapiens
  Heavy chain CDR3 for antibody 12382 (IGHV3-33)
ARVDTAAPYFDY

SEQ ID NO: 24765 - protein, 8 aa, Homo sapiens
  Light chain CDR3 for antibody 12383 (IGKV3-15)
QQYNNWPT

SEQ ID NO: 24766 - protein, 9 aa, Homo sapiens
  Heavy chain CDR3 for antibody 12383 (IGHV1-18)
ARGKDWFDP

SEQ ID NO: 24767 - protein, 8 aa, Homo sapiens
  Light chain CDR3 for antibody 12384 (IGKV1D-13)
QQFNNYPT

SEQ ID NO: 24768 - protein, 19 aa, Homo sapiens
  Heavy chain CDR3 for antibody 12384 (IGHV3-33)
ARIPGIAVAGGYYYYSMDV

SEQ ID NO: 24769 - protein, 9 aa, Homo sapiens
  Light chain CDR3 for antibody 12385 (IGKV1-6)
LQDYNYPYT

SEQ ID NO: 24770 - protein, 14 aa, Homo sapiens
  Heavy chain CDR3 for antibody 12385 (IGHV3-33)
AREMVRGVPNWFDH

SEQ ID NO: 24771 - protein, 9 aa, Homo sapiens
  Light chain CDR3 for antibody 12386 (IGKV2-30)
MQGTHWPLT

SEQ ID NO: 24772 - protein, 23 aa, Homo sapiens
  Heavy chain CDR3 for antibody 12386 (IGHV1-18)
ARNLHYDILTGYFPYYFYYGMDV

SEQ ID NO: 24773 - protein, 9 aa, Homo sapiens
  Light chain CDR3 for antibody 12387 (IGKV3-11)
QQRSSWPPT

SEQ ID NO: 24774 - protein, 18 aa, Homo sapiens
  Heavy chain CDR3 for antibody 12387 (IGHV3-33)
ARGLLWFGVSYYYYCMDV

SEQ ID NO: 24775 - protein, 9 aa, Homo sapiens
  Light chain CDR3 for antibody 12388 (IGKV1-9)
QQGNTYSRT

SEQ ID NO: 24776 - protein, 16 aa, Homo sapiens
  Heavy chain CDR3 for antibody 12388 (IGHV4-59)
ARYSGSYYGDYYGMDV

SEQ ID NO: 24777 - protein, 9 aa, Homo sapiens
  Light chain CDR3 for antibody 12389 (IGKV1-17)
LQHYSYPPT

SEQ ID NO: 24778 - protein, 13 aa, Homo sapiens
  Heavy chain CDR3 for antibody 12389 (IGHV3-33)
ARAFIMVRGVIDY

SEQ ID NO: 24779 - protein, 9 aa, Homo sapiens
  Light chain CDR3 for antibody 12390 (IGKV1-6)
LQDYNYPRT

SEQ ID NO: 24780 - protein, 15 aa, Homo sapiens
  Heavy chain CDR3 for antibody 12390 (IGHV3-33)
ARVPNYGSGSYFFDY

SEQ ID NO: 24781 - protein, 8 aa, Homo sapiens
  Light chain CDR3 for antibody 12391 (IGKV1-5)
QQYNSYWT

SEQ ID NO: 24782 - protein, 13 aa, Homo sapiens
  Heavy chain CDR3 for antibody 12391 (IGHV3-33)
ARGDNWNDGGFDY

SEQ ID NO: 24783 - protein, 9 aa, Homo sapiens
  Light chain CDR3 for antibody 12392 (IGKV1-9)
QQLNTYPWT

SEQ ID NO: 24784 - protein, 14 aa, Homo sapiens
  Heavy chain CDR3 for antibody 12392 (IGHV3-33)
ARDREQQLVRYFDY

SEQ ID NO: 24785 - protein, 9 aa, Homo sapiens
  Light chain CDR3 for antibody 12393 (IGKV1-17)
LQQNSYPWT

SEQ ID NO: 24786 - protein, 23 aa, Homo sapiens
  Heavy chain CDR3 for antibody 12393 (IGHV4-59)
ARERTYSGILPGYYEDYYYGMDV

SEQ ID NO: 24787 - protein, 9 aa, Homo sapiens
  Light chain CDR3 for antibody 12394 (IGKV3-11)
QQRSNWPYT

SEQ ID NO: 24788 - protein, 18 aa, Homo sapiens
  Heavy chain CDR3 for antibody 12394 (IGHV3-33)
AREGYDILTGDYRLGFDY

SEQ ID NO: 24789 - protein, 9 aa, Homo sapiens
  Light chain CDR3 for antibody 12395 (IGKV6-21)
HQSSSLPYT

SEQ ID NO: 24790 - protein, 10 aa, Homo sapiens
  Heavy chain CDR3 for antibody 12395 (IGHV3-23)
AKEGMVLRYV

SEQ ID NO: 24791 - protein, 9 aa, Homo sapiens
  Light chain CDR3 for antibody 12396 (IGKV1-9)
QQLNSYPYT

SEQ ID NO: 24792 - protein, 18 aa, Homo sapiens
  Heavy chain CDR3 for antibody 12396 (IGHV3-33)
AREGSYYGSGSFPNWFDH

SEQ ID NO: 24793 - protein, 9 aa, Homo sapiens
  Light chain CDR3 for antibody 12397 (IGKV6-21)
HQSSSLPYT

SEQ ID NO: 24794 - protein, 14 aa, Homo sapiens
  Heavy chain CDR3 for antibody 12397 (IGHV1-18)
ARDQPTVPSGYFDY

SEQ ID NO: 24795 - protein, 9 aa, Homo sapiens
  Light chain CDR3 for antibody 12398 (IGKV2-30)
MQGTHWPLT

SEQ ID NO: 24796 - protein, 18 aa, Homo sapiens
  Heavy chain CDR3 for antibody 12398 (IGHV3-33)
AREIAAAGTKGLYYGMDV

SEQ ID NO: 24797 - protein, 9 aa, Homo sapiens
  Light chain CDR3 for antibody 12399 (IGKV3D-7)
QQDYTLPLT

SEQ ID NO: 24798 - protein, 12 aa, Homo sapiens
  Heavy chain CDR3 for antibody 12399 (IGHV6-1)
ARLDWNYRAFDI

SEQ ID NO: 24799 - protein, 9 aa, Homo sapiens
  Light chain CDR3 for antibody 12400 (IGKV1D-16)
QQYITYPYT

SEQ ID NO: 24800 - protein, 14 aa, Homo sapiens
  Heavy chain CDR3 for antibody 12400 (IGHV3-23)
AKSRIVGALYYFDY

SEQ ID NO: 24801 - protein, 8 aa, Homo sapiens
  Light chain CDR3 for antibody 12401 (IGKV1D-16)
QQYNYPFT

SEQ ID NO: 24802 - protein, 18 aa, Homo sapiens
  Heavy chain CDR3 for antibody 12401 (IGHV1-46)
ARDGDYVWGSYRSDWFDP

SEQ ID NO: 24803 - protein, 9 aa, Homo sapiens
  Light chain CDR3 for antibody 12402 (IGKV1D-13)
QQFNNYPHT

SEQ ID NO: 24804 - protein, 16 aa, Homo sapiens
  Heavy chain CDR3 for antibody 12402 (IGHV3-33)
ARGEQWLGYYYYGMDV

SEQ ID NO: 24805 - protein, 9 aa, Homo sapiens
  Light chain CDR3 for antibody 12403 (IGKV1-9)
QQLYTYPYT

SEQ ID NO: 24806 - protein, 13 aa, Homo sapiens
  Heavy chain CDR3 for antibody 12403 (IGHV3-23)
ASTGDSYYYGMDV

SEQ ID NO: 24807 - protein, 10 aa, Homo sapiens
  Light chain CDR3 for antibody 12404 (IGKV1-17)
LQHNSYPIYT

SEQ ID NO: 24808 - protein, 17 aa, Homo sapiens
  Heavy chain CDR3 for antibody 12404 (IGHV3-33)
AREDYDILTGYPFYFDY

SEQ ID NO: 24809 - protein, 9 aa, Homo sapiens
  Light chain CDR3 for antibody 12405 (IGKV6-21)
HQSYSLPHT

SEQ ID NO: 24810 - protein, 18 aa, Homo sapiens
  Heavy chain CDR3 for antibody 12405 (IGHV4-59)
AREGDYVWGSYRPNWLDP

SEQ ID NO: 24811 - protein, 9 aa, Homo sapiens
  Light chain CDR3 for antibody 12406 (IGKV1D-16)
QQYSSYPYT

SEQ ID NO: 24812 - protein, 15 aa, Homo sapiens
  Heavy chain CDR3 for antibody 12406 (IGHV3-23)
AKDGSYSYYYYGMDV

SEQ ID NO: 24813 - protein, 9 aa, Homo sapiens
  Light chain CDR3 for antibody 12407 (IGKV1D-16)
QQYHSYPYT

SEQ ID NO: 24814 - protein, 12 aa, Homo sapiens
  Heavy chain CDR3 for antibody 12407 (IGHV1-46)
STGLTGLPASYI

SEQ ID NO: 24815 - protein, 10 aa, Homo sapiens
  Light chain CDR3 for antibody 12408 (IGKV3-11)
QQRSNWPIFT

SEQ ID NO: 24816 - protein, 19 aa, Homo sapiens
  Heavy chain CDR3 for antibody 12408 (IGHV1-18)
ARGGHIGVVTAFHGYGMDV

SEQ ID NO: 24817 - protein, 9 aa, Homo sapiens
  Light chain CDR3 for antibody 12409 (IGKV1-6)
LQDYNYPFT

SEQ ID NO: 24818 - protein, 16 aa, Homo sapiens
  Heavy chain CDR3 for antibody 12409 (IGHV4-59)
ARGRYFDWLSGDVFDI

SEQ ID NO: 24819 - protein, 9 aa, Homo sapiens
  Light chain CDR3 for antibody 12410 (IGKV3-20)
QQYGSSPYT

SEQ ID NO: 24820 - protein, 19 aa, Homo sapiens
  Heavy chain CDR3 for antibody 12410 (IGHV1-46)
ARGDSLLWFGELLPDAFDI

SEQ ID NO: 24821 - protein, 9 aa, Homo sapiens
  Light chain CDR3 for antibody 12411 (IGKV3-11)
QQRSSWPPT

SEQ ID NO: 24822 - protein, 20 aa, Homo sapiens
  Heavy chain CDR3 for antibody 12411 (IGHV3-33)
ARDWMVRGVIITDYYYGMAV

SEQ ID NO: 24823 - protein, 9 aa, Homo sapiens
  Light chain CDR3 for antibody 12412 (IGKV3-15)
QQYHNWPLT

SEQ ID NO: 24824 - protein, 16 aa, Homo sapiens
  Heavy chain CDR3 for antibody 12412 (IGHV3-33)
ARGYDMLTGDYYGMDV

SEQ ID NO: 24825 - protein, 8 aa, Homo sapiens
  Light chain CDR3 for antibody 12413 (IGKV3-15)
QQYNNWPT

SEQ ID NO: 24826 - protein, 14 aa, Homo sapiens
  Heavy chain CDR3 for antibody 12413 (IGHV3-33)
ARASSGSSYWYFDL

SEQ ID NO: 24827 - protein, 10 aa, Homo sapiens
  Light chain CDR3 for antibody 12414 (IGKV3-11)
QQRSNWPIFT

SEQ ID NO: 24828 - protein, 14 aa, Homo sapiens
  Heavy chain CDR3 for antibody 12414 (IGHV1-46)
ARRGIVGALDAFDI

SEQ ID NO: 24829 - protein, 9 aa, Homo sapiens
  Light chain CDR3 for antibody 12415 (IGKV3-11)
QQYSNWPPT

SEQ ID NO: 24830 - protein, 11 aa, Homo sapiens
  Heavy chain CDR3 for antibody 12415 (IGHV3-33)
ARDQGGSSFDY

SEQ ID NO: 24831 - protein, 10 aa, Homo sapiens
  Light chain CDR3 for antibody 12416 (IGKV3-11)
QQRSNWPALT

SEQ ID NO: 24832 - protein, 12 aa, Homo sapiens
  Heavy chain CDR3 for antibody 12416 (IGHV3-33)
AREGIAVAGVDP

SEQ ID NO: 24833 - protein, 9 aa, Homo sapiens
  Light chain CDR3 for antibody 12417 (IGKV1D-13)
QRFNNYLYT

SEQ ID NO: 24834 - protein, 16 aa, Homo sapiens
  Heavy chain CDR3 for antibody 12417 (IGHV1-18)
ARYFDWLLRDYYGMDV

SEQ ID NO: 24835 - protein, 9 aa, Homo sapiens
  Light chain CDR3 for antibody 12418 (IGKV1-17)
LHSNNYPWT

SEQ ID NO: 24836 - protein, 13 aa, Homo sapiens
  Heavy chain CDR3 for antibody 12418 (IGHV3-33)
ASAGNSYYNVMDV

SEQ ID NO: 24837 - protein, 9 aa, Homo sapiens
  Light chain CDR3 for antibody 12419 (IGKV1-5)
QQYNTYSRT

SEQ ID NO: 24838 - protein, 14 aa, Homo sapiens
  Heavy chain CDR3 for antibody 12419 (IGHV3-33)
ARDREQQLVRYFDY

SEQ ID NO: 24839 - protein, 9 aa, Homo sapiens
  Light chain CDR3 for antibody 12420 (IGKV5-2)
LQHDNFPYT

SEQ ID NO: 24840 - protein, 13 aa, Homo sapiens
  Heavy chain CDR3 for antibody 12420 (IGHV4-39)
ARRDGSYYGYFGY

SEQ ID NO: 24841 - protein, 9 aa, Homo sapiens
  Light chain CDR3 for antibody 12421 (IGKV1-37)
QRTSNAPYT

SEQ ID NO: 24842 - protein, 10 aa, Homo sapiens
  Heavy chain CDR3 for antibody 12421 (IGHV3-23)
AKGDRWRFDP

SEQ ID NO: 24843 - protein, 10 aa, Homo sapiens
  Light chain CDR3 for antibody 12422 (IGKV1-17)
LQHNSYPMYT

SEQ ID NO: 24844 - protein, 18 aa, Homo sapiens
  Heavy chain CDR3 for antibody 12422 (IGHV3-33)
ARERGYYGSDIYPAAFDI

SEQ ID NO: 24845 - protein, 9 aa, Homo sapiens
  Light chain CDR3 for antibody 12423 (IGKV1-6)
LQVYSYPWT

SEQ ID NO: 24846 - protein, 17 aa, Homo sapiens
  Heavy chain CDR3 for antibody 12423 (IGHV4-59)
ARDFLVRGEGSYYGMDV

SEQ ID NO: 24847 - protein, 8 aa, Homo sapiens
  Light chain CDR3 for antibody 12424 (IGKV3-20)
QQYGSSLT

SEQ ID NO: 24848 - protein, 14 aa, Homo sapiens
  Heavy chain CDR3 for antibody 12424 (IGHV3-33)
ARRGSPLRPSHLDV

SEQ ID NO: 24849 - protein, 8 aa, Homo sapiens
  Light chain CDR3 for antibody 12425 (IGKV3-20)
QQYGSSLT

SEQ ID NO: 24850 - protein, 20 aa, Homo sapiens
  Heavy chain CDR3 for antibody 12425 (IGHV3-33)
AREDYYGSGSYYPAYNWFDP

SEQ ID NO: 24851 - protein, 9 aa, Homo sapiens
  Light chain CDR3 for antibody 12426 (IGKV1D-16)
QQYDSYPWT

SEQ ID NO: 24852 - protein, 17 aa, Homo sapiens
  Heavy chain CDR3 for antibody 12426 (IGHV3-33)
ARAYYDILTGYSYYCDY

SEQ ID NO: 24853 - protein, 10 aa, Homo sapiens
  Light chain CDR3 for antibody 12427 (IGKV3-11)
QQRSNWPIWT

SEQ ID NO: 24854 - protein, 15 aa, Homo sapiens
  Heavy chain CDR3 for antibody 12427 (IGHV3-66)
ARDRDYYYYYYGMDV

SEQ ID NO: 24855 - protein, 9 aa, Homo sapiens
  Light chain CDR3 for antibody 12428 (IGKV1-9)
QQLNSYPPT

SEQ ID NO: 24856 - protein, 14 aa, Homo sapiens
  Heavy chain CDR3 for antibody 12428 (IGHV1-46)
ARRGIVGALDAFDI

SEQ ID NO: 24857 - protein, 9 aa, Homo sapiens
  Light chain CDR3 for antibody 12429 (IGKV1-9)
QQLKSYLYT

SEQ ID NO: 24858 - protein, 13 aa, Homo sapiens
  Heavy chain CDR3 for antibody 12429 (IGHV3-33)
ARDQRYSSGWYDY

SEQ ID NO: 24859 - protein, 9 aa, Homo sapiens
  Light chain CDR3 for antibody 12430 (IGKV1-6)
LQDYKSPFT

SEQ ID NO: 24860 - protein, 13 aa, Homo sapiens
  Heavy chain CDR3 for antibody 12430 (IGHV3-21)
ARDSTLVRGVFPY

SEQ ID NO: 24861 - protein, 9 aa, Homo sapiens
  Light chain CDR3 for antibody 12431 (IGKV5-2)
LQHDNFPYT

SEQ ID NO: 24862 - protein, 12 aa, Homo sapiens
  Heavy chain CDR3 for antibody 12431 (IGHV3-30)
ARDFTGHYTSDV

SEQ ID NO: 24863 - protein, 10 aa, Homo sapiens
  Light chain CDR3 for antibody 12432 (IGKV1-9)
QQLDSYPMYT

SEQ ID NO: 24864 - protein, 12 aa, Homo sapiens
  Heavy chain CDR3 for antibody 12432 (IGHV3-13)
ARDRGYSGYFDY

SEQ ID NO: 24865 - protein, 9 aa, Homo sapiens
  Light chain CDR3 for antibody 12433 (IGKV1-6)
LQDYNYPFT

SEQ ID NO: 24866 - protein, 13 aa, Homo sapiens
  Heavy chain CDR3 for antibody 12433 (IGHV3-30)
ARVGDSVMVPFDY

SEQ ID NO: 24867 - protein, 9 aa, Homo sapiens
  Light chain CDR3 for antibody 12434 (IGKV6-21)
HQSYSLPHT

SEQ ID NO: 24868 - protein, 14 aa, Homo sapiens
  Heavy chain CDR3 for antibody 12434 (IGHV3-33)
ARDNILTVYYLFDY

SEQ ID NO: 24869 - protein, 10 aa, Homo sapiens
  Light chain CDR3 for antibody 12435 (IGKV3-11)
QQRSNWPPWT

SEQ ID NO: 24870 - protein, 12 aa, Homo sapiens
  Heavy chain CDR3 for antibody 12435 (IGHV3-23)
AKGAVVTAIFDY

SEQ ID NO: 24871 - protein, 9 aa, Homo sapiens
  Light chain CDR3 for antibody 12436 (IGKV1-9)
QQLISYPLT

SEQ ID NO: 24872 - protein, 7 aa, Homo sapiens
  Heavy chain CDR3 for antibody 12436 (IGHV1-46)
AREGGDY

SEQ ID NO: 24873 - protein, 9 aa, Homo sapiens
  Light chain CDR3 for antibody 12437 (IGKV3-11)
QQRSNWMYT

SEQ ID NO: 24874 - protein, 17 aa, Homo sapiens
  Heavy chain CDR3 for antibody 12437 (IGHV3-23)
AKGNYGSGSYYNGDFQH

SEQ ID NO: 24875 - protein, 8 aa, Homo sapiens
  Light chain CDR3 for antibody 12438 (IGKV2D-28)
MQALQTPT

SEQ ID NO: 24876 - protein, 16 aa, Homo sapiens
  Heavy chain CDR3 for antibody 12438 (IGHV4-59)
AGGSGSYRDYYYGIDV

SEQ ID NO: 24877 - protein, 10 aa, Homo sapiens
  Light chain CDR3 for antibody 12439 (IGKV3-11)
QQRSTWPTLT

SEQ ID NO: 24878 - protein, 16 aa, Homo sapiens
  Heavy chain CDR3 for antibody 12439 (IGHV3-33)
ARGGRSDWLYYYGMDV

SEQ ID NO: 24879 - protein, 9 aa, Homo sapiens
  Light chain CDR3 for antibody 12440 (IGKV2D-28)
MQALQTPPT

SEQ ID NO: 24880 - protein, 14 aa, Homo sapiens
  Heavy chain CDR3 for antibody 12440 (IGHV3-23)
AKSRIVGALYYFDY

SEQ ID NO: 24881 - protein, 9 aa, Homo sapiens
  Light chain CDR3 for antibody 12441 (IGKV6-21)
HQSTSLPFT

SEQ ID NO: 24882 - protein, 9 aa, Homo sapiens
  Heavy chain CDR3 for antibody 12441 (IGHV3-23)
AKEQLLFDY

SEQ ID NO: 24883 - protein, 9 aa, Homo sapiens
  Light chain CDR3 for antibody 12442 (IGKV1-39)
QQSYSTPYT

SEQ ID NO: 24884 - protein, 17 aa, Homo sapiens
  Heavy chain CDR3 for antibody 12442 (IGHV4-59)
ASRITMVREIIITAFDY

SEQ ID NO: 24885 - protein, 10 aa, Homo sapiens
  Light chain CDR3 for antibody 12443 (IGKV1-39)
QQSYSTPMYT

SEQ ID NO: 24886 - protein, 20 aa, Homo sapiens
  Heavy chain CDR3 for antibody 12443 (IGHV1-f)
ATGLITFVRGVILTYRSFDY

SEQ ID NO: 24887 - protein, 9 aa, Homo sapiens
  Light chain CDR3 for antibody 12444 (IGKV2-30)
MQGTHWPLT

SEQ ID NO: 24888 - protein, 14 aa, Homo sapiens
  Heavy chain CDR3 for antibody 12444 (IGHV3-33)
AKSYDILTGEAFDI

SEQ ID NO: 24889 - protein, 9 aa, Homo sapiens
  Light chain CDR3 for antibody 12445 (IGKV3D-20)
QQYGSSPYT

SEQ ID NO: 24890 - protein, 10 aa, Homo sapiens
  Heavy chain CDR3 for antibody 12445 (IGHV4-39)
ASSNWNDGPL

SEQ ID NO: 24891 - protein, 9 aa, Homo sapiens
  Light chain CDR3 for antibody 12446 (IGKV1-9)
QQLNSYPYT

SEQ ID NO: 24892 - protein, 14 aa, Homo sapiens
  Heavy chain CDR3 for antibody 12446 (IGHV3-33)
ARDWNDGYYYGMDL

SEQ ID NO: 24893 - protein, 10 aa, Homo sapiens
  Light chain CDR3 for antibody 12447 (IGKV1-39)
QQSYSSPMYT

SEQ ID NO: 24894 - protein, 8 aa, Homo sapiens
  Heavy chain CDR3 for antibody 12447 (IGHV4-39)
ARRGGLDY

SEQ ID NO: 24895 - protein, 9 aa, Homo sapiens
  Light chain CDR3 for antibody 12448 (IGKV1D-13)
QQFNNYPYT

SEQ ID NO: 24896 - protein, 10 aa, Homo sapiens
  Heavy chain CDR3 for antibody 12448 (IGHV3-23)
AKDRYGDYVY

SEQ ID NO: 24897 - protein, 9 aa, Homo sapiens
  Light chain CDR3 for antibody 12449 (IGKV1-39)
QQGFSTPWT

SEQ ID NO: 24898 - protein, 11 aa, Homo sapiens
  Heavy chain CDR3 for antibody 12449 (IGHV4-4)
AREAYYYGLDV

SEQ ID NO: 24899 - protein, 9 aa, Homo sapiens
  Light chain CDR3 for antibody 12450 (IGKV1-6)
LQDYKSPFT

SEQ ID NO: 24900 - protein, 16 aa, Homo sapiens
  Heavy chain CDR3 for antibody 12450 (IGHV3-23)
ARNWNDVGDYYYGMDV

SEQ ID NO: 24901 - protein, 9 aa, Homo sapiens
  Light chain CDR3 for antibody 12451 (IGKV1-17)
LQHNTYPYT

SEQ ID NO: 24902 - protein, 20 aa, Homo sapiens
  Heavy chain CDR3 for antibody 12451 (IGHV3-33)
ARRMVRGVKKTYYYYYGLEV

SEQ ID NO: 24903 - protein, 9 aa, Homo sapiens
  Light chain CDR3 for antibody 12452 (IGKV3-11)
QQYINWPLT

SEQ ID NO: 24904 - protein, 10 aa, Homo sapiens
  Heavy chain CDR3 for antibody 12452 (IGHV1-46)
AREWELLFDY

SEQ ID NO: 24905 - protein, 8 aa, Homo sapiens
  Light chain CDR3 for antibody 12453 (IGKV2D-28)
MQALQTPP

SEQ ID NO: 24906 - protein, 24 aa, Homo sapiens
  Heavy chain CDR3 for antibody 12453 (IGHV3-20)
ARGRITMVRGVIINPLDYYNGMDV

SEQ ID NO: 24907 - protein, 9 aa, Homo sapiens
  Light chain CDR3 for antibody 12454 (IGKV1D-16)
QQYITYPYT

SEQ ID NO: 24908 - protein, 17 aa, Homo sapiens
  Heavy chain CDR3 for antibody 12454 (IGHV1-18)
ARERYYGSGNYKYNMDV

SEQ ID NO: 24909 - protein, 9 aa, Homo sapiens
  Light chain CDR3 for antibody 12455 (IGKV1-39)
QQSYSTPYA

SEQ ID NO: 24910 - protein, 12 aa, Homo sapiens
  Heavy chain CDR3 for antibody 12455 (IGHV3-66)
ARGYFGSGYAHF

SEQ ID NO: 24911 - protein, 9 aa, Homo sapiens
  Light chain CDR3 for antibody 12456 (IGKV3-15)
QQYNNWPRT

SEQ ID NO: 24912 - protein, 12 aa, Homo sapiens
  Heavy chain CDR3 for antibody 12456 (IGHV3-23)
AKGYTSFWYFDL

SEQ ID NO: 24913 - protein, 10 aa, Homo sapiens
  Light chain CDR3 for antibody 12457 (IGKV1-9)
QQLNSFLMYT

SEQ ID NO: 24914 - protein, 15 aa, Homo sapiens
  Heavy chain CDR3 for antibody 12457 (IGHV4-59)
ARDLGHYYGSVSIDY

SEQ ID NO: 24915 - protein, 9 aa, Homo sapiens
  Light chain CDR3 for antibody 12458 (IGKV1-9)
QQGFSTPWT

SEQ ID NO: 24916 - protein, 13 aa, Homo sapiens
  Heavy chain CDR3 for antibody 12458 (IGHV4-39)
ARHVLLWFGEFDP

SEQ ID NO: 24917 - protein, 9 aa, Homo sapiens
  Light chain CDR3 for antibody 12459 (IGKV1D-13)
QQFNNYPYT

SEQ ID NO: 24918 - protein, 12 aa, Homo sapiens
  Heavy chain CDR3 for antibody 12459 (IGHV1-18)
ARVLFDGDYFDY

SEQ ID NO: 24919 - protein, 10 aa, Homo sapiens
  Light chain CDR3 for antibody 12460 (IGKV1-39)
QQSYSTPMYT

SEQ ID NO: 24920 - protein, 9 aa, Homo sapiens
  Heavy chain CDR3 for antibody 12460 (IGHV3-23)
AKEQQLFDY

SEQ ID NO: 24921 - protein, 9 aa, Homo sapiens
  Light chain CDR3 for antibody 12461 (IGKV1D-13)
QHFNNYMYT

SEQ ID NO: 24922 - protein, 17 aa, Homo sapiens
  Heavy chain CDR3 for antibody 12461 (IGHV3-33)
ARVRGVIEGYYYYGMDV

SEQ ID NO: 24923 - protein, 9 aa, Homo sapiens
  Light chain CDR3 for antibody 12462 (IGKV1-17)
LQHNSYPYT

SEQ ID NO: 24924 - protein, 12 aa, Homo sapiens
  Heavy chain CDR3 for antibody 12462 (IGHV3-33)
ASEYFGSGSAHY

SEQ ID NO: 24925 - protein, 9 aa, Homo sapiens
  Light chain CDR3 for antibody 12463 (IGKV3D-7)
QQDYEFPIT

SEQ ID NO: 24926 - protein, 13 aa, Homo sapiens
  Heavy chain CDR3 for antibody 12463 (IGHV4-59)
ARHPPSRDYGMDV

SEQ ID NO: 24927 - protein, 10 aa, Homo sapiens
  Light chain CDR3 for antibody 12464 (IGKV3-11)
QQRSNWPIFT

SEQ ID NO: 24928 - protein, 14 aa, Homo sapiens
  Heavy chain CDR3 for antibody 12464 (IGHV3-20)
ARDGGSGSYDGLDV

SEQ ID NO: 24929 - protein, 8 aa, Homo sapiens
  Light chain CDR3 for antibody 12465 (IGKV3D-7)
QQDYNLLT

SEQ ID NO: 24930 - protein, 20 aa, Homo sapiens
  Heavy chain CDR3 for antibody 12465 (IGHV3-33)
ARDLGWATMVRGVIRAPFDY

SEQ ID NO: 24931 - protein, 8 aa, Homo sapiens
  Light chain CDR3 for antibody 12466 (IGKV3D-7)
QQDYNSLT

SEQ ID NO: 24932 - protein, 17 aa, Homo sapiens
  Heavy chain CDR3 for antibody 12466 (IGHV3-33)
ARGGAAAGPYLYYGLDV

SEQ ID NO: 24933 - protein, 9 aa, Homo sapiens
  Light chain CDR3 for antibody 12467 (IGKV1-16)
QQYTSYPFT

SEQ ID NO: 24934 - protein, 19 aa, Homo sapiens
  Heavy chain CDR3 for antibody 12467 (IGHV4-59)
ARDRGYDILTGYSLDYFDY

SEQ ID NO: 24935 - protein, 9 aa, Homo sapiens
  Light chain CDR3 for antibody 12468 (IGKV3-20)
QHYGSSPYT

SEQ ID NO: 24936 - protein, 9 aa, Homo sapiens
  Heavy chain CDR3 for antibody 12468 (IGHV3-33)
AREYKEFDY

SEQ ID NO: 24937 - protein, 9 aa, Homo sapiens
  Light chain CDR3 for antibody 12469 (IGKV1D-13)
QQFNNYPLT

SEQ ID NO: 24938 - protein, 17 aa, Homo sapiens
  Heavy chain CDR3 for antibody 12469 (IGHV3-23)
AKAMVRGVHYHHYGMDV

SEQ ID NO: 24939 - protein, 10 aa, Homo sapiens
  Light chain CDR3 for antibody 12470 (IGKV1-39)
QQSYSTPMYT

SEQ ID NO: 24940 - protein, 12 aa, Homo sapiens
  Heavy chain CDR3 for antibody 12470 (IGHV1-18)
ARILFYGDYFDY

SEQ ID NO: 24941 - protein, 8 aa, Homo sapiens
  Light chain CDR3 for antibody 12471 (IGKV3D-7)
QQDYHLLT

SEQ ID NO: 24942 - protein, 15 aa, Homo sapiens
  Heavy chain CDR3 for antibody 12471 (IGHV3-33)
VRGYYYGSGSYPLNY

SEQ ID NO: 24943 - protein, 9 aa, Homo sapiens
  Light chain CDR3 for antibody 12472 (IGKV3D-7)
QQDYEFPIT

SEQ ID NO: 24944 - protein, 19 aa, Homo sapiens
  Heavy chain CDR3 for antibody 12472 (IGHV1-24)
ATAGLQWFGEKIGYYGMDV

SEQ ID NO: 24945 - protein, 9 aa, Homo sapiens
  Light chain CDR3 for antibody 12473 (IGKV1-16)
QQYNSYPYT

SEQ ID NO: 24946 - protein, 18 aa, Homo sapiens
  Heavy chain CDR3 for antibody 12473 (IGHV4-59)
ARERGNWNDVDYCYGMDV

SEQ ID NO: 24947 - protein, 9 aa, Homo sapiens
  Light chain CDR3 for antibody 12474 (IGKV1D-16)
QQYNSYPYT

SEQ ID NO: 24948 - protein, 14 aa, Homo sapiens
  Heavy chain CDR3 for antibody 12474 (IGHV3-33)
ARDYYDSGSYYFDY

SEQ ID NO: 24949 - protein, 9 aa, Homo sapiens
  Light chain CDR3 for antibody 12475 (IGKV3-15)
QQYNNWPRT

SEQ ID NO: 24950 - protein, 17 aa, Homo sapiens
  Heavy chain CDR3 for antibody 12475 (IGHV3-64)
ARERYYGSGSYYNWFDP

SEQ ID NO: 24951 - protein, 8 aa, Homo sapiens
  Light chain CDR3 for antibody 12476 (IGKV3-20)
QQYGSSLT

SEQ ID NO: 24952 - protein, 12 aa, Homo sapiens
  Heavy chain CDR3 for antibody 12476 (IGHV3-33)
ARDLGGATPFDY

SEQ ID NO: 24953 - protein, 10 aa, Homo sapiens
  Light chain CDR3 for antibody 12477 (IGKV3-20)
QQYGRSPPVT

SEQ ID NO: 24954 - protein, 15 aa, Homo sapiens
  Heavy chain CDR3 for antibody 12477 (IGHV3-33)
ARDHLTGYYYYGMDV

SEQ ID NO: 24955 - protein, 9 aa, Homo sapiens
  Light chain CDR3 for antibody 12478 (IGKV1-17)
LHSNNYPWT

SEQ ID NO: 24956 - protein, 16 aa, Homo sapiens
  Heavy chain CDR3 for antibody 12478 (IGHV3-33)
ARGGRSDWLYYYGMDV

SEQ ID NO: 24957 - protein, 9 aa, Homo sapiens
  Light chain CDR3 for antibody 12479 (IGKV1-17)
QQFNNYPHT

SEQ ID NO: 24958 - protein, 8 aa, Homo sapiens
  Heavy chain CDR3 for antibody 12479 (IGHV4-4)
ARGARFDP

SEQ ID NO: 24959 - protein, 8 aa, Homo sapiens
  Light chain CDR3 for antibody 12480 (IGKV3-15)
QQYNNYPT

SEQ ID NO: 24960 - protein, 12 aa, Homo sapiens
  Heavy chain CDR3 for antibody 12480 (IGHV3-33)
ARAGMGAPYFDY

SEQ ID NO: 24961 - protein, 10 aa, Homo sapiens
  Light chain CDR3 for antibody 12481 (IGKV1-17)
LQHNSYPMYT

SEQ ID NO: 24962 - protein, 16 aa, Homo sapiens
  Heavy chain CDR3 for antibody 12481 (IGHV3-33)
ARGDDILTHQYYGVDV

SEQ ID NO: 24963 - protein, 9 aa, Homo sapiens
  Light chain CDR3 for antibody 12482 (IGKV1-9)
QQLNSYPYT

SEQ ID NO: 24964 - protein, 11 aa, Homo sapiens
  Heavy chain CDR3 for antibody 12482 (IGHV3-33)
ARARYTTGLDY

SEQ ID NO: 24965 - protein, 9 aa, Homo sapiens
  Light chain CDR3 for antibody 12483 (IGKV3D-7)
QQDYNLPYS

SEQ ID NO: 24966 - protein, 15 aa, Homo sapiens
  Heavy chain CDR3 for antibody 12483 (IGHV1-18)
ARGYCSSTSCYYFDY

SEQ ID NO: 24967 - protein, 9 aa, Homo sapiens
  Light chain CDR3 for antibody 12484 (IGKV1-17)
LQHYSYPRT

SEQ ID NO: 24968 - protein, 10 aa, Homo sapiens
  Heavy chain CDR3 for antibody 12484 (IGHV3-33)
VRDVVVYFDY

SEQ ID NO: 24969 - protein, 9 aa, Homo sapiens
  Light chain CDR3 for antibody 12485 (IGKV1D-13)
QQFNNYPYT

SEQ ID NO: 24970 - protein, 12 aa, Homo sapiens
  Heavy chain CDR3 for antibody 12485 (IGHV1-18)
ARKGIEVGGFDY

SEQ ID NO: 24971 - protein, 8 aa, Homo sapiens
  Light chain CDR3 for antibody 12486 (IGKV3-11)
LQRGNWPT

SEQ ID NO: 24972 - protein, 14 aa, Homo sapiens
  Heavy chain CDR3 for antibody 12486 (IGHV3-33)
ARDGYDFLTGPFDY

SEQ ID NO: 24973 - protein, 9 aa, Homo sapiens
  Light chain CDR3 for antibody 12487 (IGKV1D-16)
QQYDNLPFT

SEQ ID NO: 24974 - protein, 14 aa, Homo sapiens
  Heavy chain CDR3 for antibody 12487 (IGHV3-33)
ARRGSPLRPSHLDV

SEQ ID NO: 24975 - protein, 10 aa, Homo sapiens
  Light chain CDR3 for antibody 12488 (IGKV3-20)
QQYGRSPPVT

SEQ ID NO: 24976 - protein, 11 aa, Homo sapiens
  Heavy chain CDR3 for antibody 12488 (IGHV3-23)
AKGLWSYYFDY

SEQ ID NO: 24977 - protein, 9 aa, Homo sapiens
  Light chain CDR3 for antibody 12489 (IGKV1-9)
QQVKSYPYT

SEQ ID NO: 24978 - protein, 15 aa, Homo sapiens
  Heavy chain CDR3 for antibody 12489 (IGHV3-23)
AKDGSYYDYYYGMDV

SEQ ID NO: 24979 - protein, 8 aa, Homo sapiens
  Light chain CDR3 for antibody 12490 (IGKV3-11)
QQRSNWLT

SEQ ID NO: 24980 - protein, 17 aa, Homo sapiens
  Heavy chain CDR3 for antibody 12490 (IGHV3-33)
ARCGYSSSWYDPYYFDY

SEQ ID NO: 24981 - protein, 9 aa, Homo sapiens
  Light chain CDR3 for antibody 12491 (IGKV1D-16)
QQYNSFPLT

SEQ ID NO: 24982 - protein, 16 aa, Homo sapiens
  Heavy chain CDR3 for antibody 12491 (IGHV4-59)
ARYSGSYYGDYYGMDV

SEQ ID NO: 24983 - protein, 9 aa, Homo sapiens
  Light chain CDR3 for antibody 12492 (IGKV1-17)
LQHNSYPPT

SEQ ID NO: 24984 - protein, 18 aa, Homo sapiens
  Heavy chain CDR3 for antibody 12492 (IGHV3-23)
AKDGDYFGSGSYWGYFDL

SEQ ID NO: 24985 - protein, 9 aa, Homo sapiens
  Light chain CDR3 for antibody 12493 (IGKV1-27)
QKYNSAPYT

SEQ ID NO: 24986 - protein, 16 aa, Homo sapiens
  Heavy chain CDR3 for antibody 12493 (IGHV3-33)
ARNWNDVGDYYYGMEV

SEQ ID NO: 24987 - protein, 10 aa, Homo sapiens
  Light chain CDR3 for antibody 12494 (IGKV1-9)
QQLDSYPMYT

SEQ ID NO: 24988 - protein, 21 aa, Homo sapiens
  Heavy chain CDR3 for antibody 12494 (IGHV3-23)
AKDIDYYGSGSYPLYYYGMDV

SEQ ID NO: 24989 - protein, 9 aa, Homo sapiens
  Light chain CDR3 for antibody 12495 (IGKV1-6)
LQDYKSPFT

SEQ ID NO: 24990 - protein, 11 aa, Homo sapiens
  Heavy chain CDR3 for antibody 12495 (IGHV3-23)
ARDPGSITGDY

SEQ ID NO: 24991 - protein, 11 aa, Homo sapiens
  Light chain CDR3 for antibody 12496 (IGKV3-11)
QQRSNWPPTWT

SEQ ID NO: 24992 - protein, 12 aa, Homo sapiens
  Heavy chain CDR3 for antibody 12496 (IGHV3-23)
AKEGLGSDYEPY

SEQ ID NO: 24993 - protein, 10 aa, Homo sapiens
  Light chain CDR3 for antibody 12497 (IGKV3-11)
QQRSTWPTLI

SEQ ID NO: 24994 - protein, 10 aa, Homo sapiens
  Heavy chain CDR3 for antibody 12497 (IGHV3-23)
AKGDRWRFDP

SEQ ID NO: 24995 - protein, 6 aa, Homo sapiens
  Light chain CDR3 for antibody 12498 (IGKV3-20)
QQYGST

SEQ ID NO: 24996 - protein, 13 aa, Homo sapiens
  Heavy chain CDR3 for antibody 12498 (IGHV3-33)
ARDYCGGDCYLDY

SEQ ID NO: 24997 - protein, 9 aa, Homo sapiens
  Light chain CDR3 for antibody 12499 (IGKV1-13)
QQYAGYPPT

SEQ ID NO: 24998 - protein, 13 aa, Homo sapiens
  Heavy chain CDR3 for antibody 12499 (IGHV1-18)
ARSYYGSGSPFDY

SEQ ID NO: 24999 - protein, 10 aa, Homo sapiens
  Light chain CDR3 for antibody 12500 (IGKV3-11)
QQRSNWPALA

SEQ ID NO: 25000 - protein, 14 aa, Homo sapiens
  Heavy chain CDR3 for antibody 12500 (IGHV3-23)
AKSRIVGALYYFDY

SEQ ID NO: 25001 - protein, 9 aa, Homo sapiens
  Light chain CDR3 for antibody 12501 (IGKV1-16)
QQYNSYPYT

SEQ ID NO: 25002 - protein, 13 aa, Homo sapiens
  Heavy chain CDR3 for antibody 12501 (IGHV3-21)
ATGAWASSWWGDY

SEQ ID NO: 25003 - protein, 9 aa, Homo sapiens
  Light chain CDR3 for antibody 12502 (IGKV1-33)
QQYDNLPFT

SEQ ID NO: 25004 - protein, 18 aa, Homo sapiens
  Heavy chain CDR3 for antibody 12502 (IGHV3-23)
AKEGNYYGSGSYWGYFDP

SEQ ID NO: 25005 - protein, 8 aa, Homo sapiens
  Light chain CDR3 for antibody 12503 (IGKV1D-13)
QQFNNYPT

SEQ ID NO: 25006 - protein, 12 aa, Homo sapiens
  Heavy chain CDR3 for antibody 12503 (IGHV3-33)
ARKGYDMHEFDI

SEQ ID NO: 25007 - protein, 7 aa, Homo sapiens
  Light chain CDR3 for antibody 12504 (IGKV1-17)
LQHNSYP

SEQ ID NO: 25008 - protein, 18 aa, Homo sapiens
  Heavy chain CDR3 for antibody 12504 (IGHV3-23)
AKEGNYYGSGSYWGYFDP

SEQ ID NO: 25009 - protein, 8 aa, Homo sapiens
  Light chain CDR3 for antibody 12505 (IGKV3D-7)
QQDYNLLT

SEQ ID NO: 25010 - protein, 14 aa, Homo sapiens
  Heavy chain CDR3 for antibody 12505 (IGHV1-46)
ARKGIVGGFDAFDV

SEQ ID NO: 25011 - protein, 9 aa, Homo sapiens
  Light chain CDR3 for antibody 12506 (IGKV1-39)
QQSYSSPFT

SEQ ID NO: 25012 - protein, 16 aa, Homo sapiens
  Heavy chain CDR3 for antibody 12506 (IGHV3-30)
ARDIAVAGHDYYGMDV

SEQ ID NO: 25013 - protein, 9 aa, Homo sapiens
  Light chain CDR3 for antibody 12507 (IGKV1-6)
LQDYNYPRT

SEQ ID NO: 25014 - protein, 18 aa, Homo sapiens
  Heavy chain CDR3 for antibody 12507 (IGHV3-20)
ARIDVYYYGSGSYRYFDY

SEQ ID NO: 25015 - protein, 9 aa, Homo sapiens
  Light chain CDR3 for antibody 12508 (IGKV1-27)
QKYNSAPYT

SEQ ID NO: 25016 - protein, 15 aa, Homo sapiens
  Heavy chain CDR3 for antibody 12508 (IGHV3-23)
AKAGGRYFDWFPFDY

SEQ ID NO: 25017 - protein, 9 aa, Homo sapiens
  Light chain CDR3 for antibody 12509 (IGKV1-17)
LQHNSYPPT

SEQ ID NO: 25018 - protein, 18 aa, Homo sapiens
  Heavy chain CDR3 for antibody 12509 (IGHV3-33)
ARDPYSSGWYDYYFGMDV

SEQ ID NO: 25019 - protein, 9 aa, Homo sapiens
  Light chain CDR3 for antibody 12510 (IGKV2-30)
MQGTHWPLT

SEQ ID NO: 25020 - protein, 14 aa, Homo sapiens
  Heavy chain CDR3 for antibody 12510 (IGHV1-2)
AREGGSGSSPGMDV

SEQ ID NO: 25021 - protein, 10 aa, Homo sapiens
  Light chain CDR3 for antibody 12511 (IGKV1-39)
QQSYSTPMYT

SEQ ID NO: 25022 - protein, 13 aa, Homo sapiens
  Heavy chain CDR3 for antibody 12511 (IGHV3-11)
AREGIAVAGDFDF

SEQ ID NO: 25023 - protein, 10 aa, Homo sapiens
  Light chain CDR3 for antibody 12512 (IGKV3-15)
QQYNNWPPYT

SEQ ID NO: 25024 - protein, 15 aa, Homo sapiens
  Heavy chain CDR3 for antibody 12512 (IGHV3-33)
ARRICSGGSCSLFDY

SEQ ID NO: 25025 - protein, 9 aa, Homo sapiens
  Light chain CDR3 for antibody 12513 (IGKV1-16)
QHYSDYPFT

SEQ ID NO: 25026 - protein, 13 aa, Homo sapiens
  Heavy chain CDR3 for antibody 12513 (IGHV3-33)
ARDWGYSHGYFDY

SEQ ID NO: 25027 - protein, 9 aa, Homo sapiens
  Light chain CDR3 for antibody 12514 (IGKV5-2)
LQHDKFPYT

SEQ ID NO: 25028 - protein, 12 aa, Homo sapiens
  Heavy chain CDR3 for antibody 12514 (IGHV1-18)
ARILFYGDYLDY

SEQ ID NO: 25029 - protein, 9 aa, Homo sapiens
  Light chain CDR3 for antibody 12515 (IGKV1-6)
QQEYNYPLT

SEQ ID NO: 25030 - protein, 13 aa, Homo sapiens
  Heavy chain CDR3 for antibody 12515 (IGHV4-39)
ARREVVGGRGFDY

SEQ ID NO: 25031 - protein, 9 aa, Homo sapiens
  Light chain CDR3 for antibody 12516 (IGKV5-2)
LQHDKFPYT

SEQ ID NO: 25032 - protein, 16 aa, Homo sapiens
  Heavy chain CDR3 for antibody 12516 (IGHV3-33)
ARAVYYGSGSSRIMDV

SEQ ID NO: 25033 - protein, 9 aa, Homo sapiens
  Light chain CDR3 for antibody 12517 (IGKV5-2)
LQHDNFPWT

SEQ ID NO: 25034 - protein, 18 aa, Homo sapiens
  Heavy chain CDR3 for antibody 12517 (IGHV3-11)
ARDGYFSGWNYYYFGMDV

SEQ ID NO: 25035 - protein, 10 aa, Homo sapiens
  Light chain CDR3 for antibody 12518 (IGKV1-6)
QQSYSTPMYT

SEQ ID NO: 25036 - protein, 14 aa, Homo sapiens
  Heavy chain CDR3 for antibody 12518 (IGHV3-20)
ARDRGSSGHDAFDI

SEQ ID NO: 25037 - protein, 9 aa, Homo sapiens
  Light chain CDR3 for antibody 12519 (IGKV3D-20)
QQYGSSPYT

SEQ ID NO: 25038 - protein, 18 aa, Homo sapiens
  Heavy chain CDR3 for antibody 12519 (IGHV3-33)
ARDHCSGGSCYYYYGMDV

SEQ ID NO: 25039 - protein, 9 aa, Homo sapiens
  Light chain CDR3 for antibody 12520 (IGKV3-15)
QQYNDWPLT

SEQ ID NO: 25040 - protein, 17 aa, Homo sapiens
  Heavy chain CDR3 for antibody 12520 (IGHV1-18)
ARQGVLLWFGELYYFDY

SEQ ID NO: 25041 - protein, 9 aa, Homo sapiens
  Light chain CDR3 for antibody 12521 (IGKV1-27)
QKYNSAPYT

SEQ ID NO: 25042 - protein, 6 aa, Homo sapiens
  Heavy chain CDR3 for antibody 12521 (IGHV1-8)
AREGTY

SEQ ID NO: 25043 - protein, 11 aa, Homo sapiens
  Light chain CDR3 for antibody 12522 (IGKV3-11)
QQRSNWPPMYT

SEQ ID NO: 25044 - protein, 16 aa, Homo sapiens
  Heavy chain CDR3 for antibody 12522 (IGHV4-59)
AREPLRYFDWPDAFDI

SEQ ID NO: 25045 - protein, 11 aa, Homo sapiens
  Light chain CDR3 for antibody 12523 (IGKV3-11)
QQRSNWPPMYT

SEQ ID NO: 25046 - protein, 16 aa, Homo sapiens
  Heavy chain CDR3 for antibody 12523 (IGHV3-33)
ARGYDMLTGDYHCMDV

SEQ ID NO: 25047 - protein, 9 aa, Homo sapiens
  Light chain CDR3 for antibody 12524 (IGKV3-11)
QQRSNWQYT

SEQ ID NO: 25048 - protein, 10 aa, Homo sapiens
  Heavy chain CDR3 for antibody 12524 (IGHV3-13)
ARDRGSYYDY

SEQ ID NO: 25049 - protein, 9 aa, Homo sapiens
  Light chain CDR3 for antibody 12525 (IGKV6-21)
HQSTSLPFT

SEQ ID NO: 25050 - protein, 16 aa, Homo sapiens
  Heavy chain CDR3 for antibody 12525 (IGHV4-59)
ARYSGSYYGDYYGMDV

SEQ ID NO: 25051 - protein, 10 aa, Homo sapiens
  Light chain CDR3 for antibody 12526 (IGKV3-11)
QQRSNWPTWT

SEQ ID NO: 25052 - protein, 11 aa, Homo sapiens
  Heavy chain CDR3 for antibody 12526 (IGHV3-23)
ARDILTGFLDH

SEQ ID NO: 25053 - protein, 7 aa, Homo sapiens
  Light chain CDR3 for antibody 12527 (IGKV3-11)
QQRSKFT

SEQ ID NO: 25054 - protein, 18 aa, Homo sapiens
  Heavy chain CDR3 for antibody 12527 (IGHV3-33)
ARREGIVGATSYYYGMDV

SEQ ID NO: 25055 - protein, 8 aa, Homo sapiens
  Light chain CDR3 for antibody 12528 (IGKV3D-7)
QQDYNLVT

SEQ ID NO: 25056 - protein, 15 aa, Homo sapiens
  Heavy chain CDR3 for antibody 12528 (IGHV4-59)
ARRITMVRGVAPFDY

SEQ ID NO: 25057 - protein, 9 aa, Homo sapiens
  Light chain CDR3 for antibody 12529 (IGKV1-16)
QQYTSYPYT

SEQ ID NO: 25058 - protein, 18 aa, Homo sapiens
  Heavy chain CDR3 for antibody 12529 (IGHV1-46)
ASMVRGVIMAYDYYGMDV

SEQ ID NO: 25059 - protein, 8 aa, Homo sapiens
  Light chain CDR3 for antibody 12530 (IGKV6-21)
HQSSSLPT

SEQ ID NO: 25060 - protein, 11 aa, Homo sapiens
  Heavy chain CDR3 for antibody 12530 (IGHV3-13)
AREAIIGPFDY

SEQ ID NO: 25061 - protein, 10 aa, Homo sapiens
  Light chain CDR3 for antibody 12531 (IGKV1-9)
QQLDSYPMYT

SEQ ID NO: 25062 - protein, 18 aa, Homo sapiens
  Heavy chain CDR3 for antibody 12531 (IGHV3-33)
ARGGVLYDILTGFYCMDV

SEQ ID NO: 25063 - protein, 10 aa, Homo sapiens
  Light chain CDR3 for antibody 12532 (IGKV3-15)
QQYNNWPPLT

SEQ ID NO: 25064 - protein, 9 aa, Homo sapiens
  Heavy chain CDR3 for antibody 12532 (IGHV3-23)
ARIWWLKDY

SEQ ID NO: 25065 - protein, 9 aa, Homo sapiens
  Light chain CDR3 for antibody 12533 (IGKV1-9)
QQLNGYPFT

SEQ ID NO: 25066 - protein, 15 aa, Homo sapiens
  Heavy chain CDR3 for antibody 12533 (IGHV3-20)
ARDRGSSGWRDWFDP

SEQ ID NO: 25067 - protein, 8 aa, Homo sapiens
  Light chain CDR3 for antibody 12534 (IGKV1D-13)
QQFNNYPT

SEQ ID NO: 25068 - protein, 10 aa, Homo sapiens
  Heavy chain CDR3 for antibody 12534 (IGHV3-30)
ARDGLESFDY

SEQ ID NO: 25069 - protein, 9 aa, Homo sapiens
  Light chain CDR3 for antibody 12535 (IGKV5-2)
LQHDKFPYT

SEQ ID NO: 25070 - protein, 22 aa, Homo sapiens
  Heavy chain CDR3 for antibody 12535 (IGHV3-11)
AREAYYDILTGYYTGYYYGMDV

SEQ ID NO: 25071 - protein, 9 aa, Homo sapiens
  Light chain CDR3 for antibody 12536 (IGKV1-33)
QQYDNLPFT

SEQ ID NO: 25072 - protein, 14 aa, Homo sapiens
  Heavy chain CDR3 for antibody 12536 (IGHV3-33)
ARQYSYGYPYYFDY

SEQ ID NO: 25073 - protein, 10 aa, Homo sapiens
  Light chain CDR3 for antibody 12537 (IGKV3-11)
QQRSIWPPYT

SEQ ID NO: 25074 - protein, 13 aa, Homo sapiens
  Heavy chain CDR3 for antibody 12537 (IGHV4-59)
ARDAGYSSSWFDY

SEQ ID NO: 25075 - protein, 9 aa, Homo sapiens
  Light chain CDR3 for antibody 12538 (IGKV1-17)
LQHNSYPYT

SEQ ID NO: 25076 - protein, 13 aa, Homo sapiens
  Heavy chain CDR3 for antibody 12538 (IGHV3-33)
ARIAAAAVQYFQH

SEQ ID NO: 25077 - protein, 8 aa, Homo sapiens
  Light chain CDR3 for antibody 12539 (IGKV3-11)
QQRSNWLT

SEQ ID NO: 25078 - protein, 14 aa, Homo sapiens
  Heavy chain CDR3 for antibody 12539 (IGHV3-33)
AREGYSSNWYDFDY

SEQ ID NO: 25079 - protein, 9 aa, Homo sapiens
  Light chain CDR3 for antibody 12540 (IGKV1-17)
QQLNSYPLT

SEQ ID NO: 25080 - protein, 9 aa, Homo sapiens
  Heavy chain CDR3 for antibody 12540 (IGHV1-18)
ARGKDWFDH

SEQ ID NO: 25081 - protein, 9 aa, Homo sapiens
  Light chain CDR3 for antibody 12541 (IGKV1-39)
QQGFSTPWT

SEQ ID NO: 25082 - protein, 12 aa, Homo sapiens
  Heavy chain CDR3 for antibody 12541 (IGHV3-33)
ARDRAYRGSLAY

SEQ ID NO: 25083 - protein, 8 aa, Homo sapiens
  Light chain CDR3 for antibody 12542 (IGKV3-15)
QQYSNWLT

SEQ ID NO: 25084 - protein, 12 aa, Homo sapiens
  Heavy chain CDR3 for antibody 12542 (IGHV3-33)
ARDRAYRGSLDY

SEQ ID NO: 25085 - protein, 8 aa, Homo sapiens
  Light chain CDR3 for antibody 12543 (IGKV1D-13)
QQFNNYPT

SEQ ID NO: 25086 - protein, 20 aa, Homo sapiens
  Heavy chain CDR3 for antibody 12543 (IGHV3-23)
AKGMGGLRYFDWPHYYGMDV

SEQ ID NO: 25087 - protein, 9 aa, Homo sapiens
  Light chain CDR3 for antibody 12544 (IGKV6-21)
HQSGSLPWT

SEQ ID NO: 25088 - protein, 17 aa, Homo sapiens
  Heavy chain CDR3 for antibody 12544 (IGHV3-23)
AKGDYYGSGTYYAFFDY

SEQ ID NO: 25089 - protein, 9 aa, Homo sapiens
  Light chain CDR3 for antibody 12545 (IGKV1-6)
QQEYNYPLT

SEQ ID NO: 25090 - protein, 17 aa, Homo sapiens
  Heavy chain CDR3 for antibody 12545 (IGHV1-46)
ARGYCSRTSCYLYYFDY

SEQ ID NO: 25091 - protein, 9 aa, Homo sapiens
  Light chain CDR3 for antibody 12546 (IGKV3D-20)
QQYGSGPWT

SEQ ID NO: 25092 - protein, 12 aa, Homo sapiens
  Heavy chain CDR3 for antibody 12546 (IGHV3-33)
ARESGGSYSFDY

SEQ ID NO: 25093 - protein, 9 aa, Homo sapiens
  Light chain CDR3 for antibody 12547 (IGKV1D-13)
QQFNNYPYT

SEQ ID NO: 25094 - protein, 14 aa, Homo sapiens
  Heavy chain CDR3 for antibody 12547 (IGHV3-23)
VRDRIAAASSDFDN

SEQ ID NO: 25095 - protein, 8 aa, Homo sapiens
  Light chain CDR3 for antibody 12548 (IGKV3-15)
QQYNNWPT

SEQ ID NO: 25096 - protein, 14 aa, Homo sapiens
  Heavy chain CDR3 for antibody 12548 (IGHV4-39)
ARQGGSGSYYNLDY

SEQ ID NO: 25097 - protein, 9 aa, Homo sapiens
  Light chain CDR3 for antibody 12549 (IGKV3-15)
QQYNNWPRT

SEQ ID NO: 25098 - protein, 11 aa, Homo sapiens
  Heavy chain CDR3 for antibody 12549 (IGHV3-33)
ARGSGSYAFDY

SEQ ID NO: 25099 - protein, 9 aa, Homo sapiens
  Light chain CDR3 for antibody 12550 (IGKV1D-13)
QHFNNYMYT

SEQ ID NO: 25100 - protein, 13 aa, Homo sapiens
  Heavy chain CDR3 for antibody 12550 (IGHV4-28)
ARKGATGYYGMDV

SEQ ID NO: 25101 - protein, 9 aa, Homo sapiens
  Light chain CDR3 for antibody 12551 (IGKV1D-16)
QQYNSYPYT

SEQ ID NO: 25102 - protein, 15 aa, Homo sapiens
  Heavy chain CDR3 for antibody 12551 (IGHV3-33)
ARDQRYSSGWYDFDY

SEQ ID NO: 25103 - protein, 9 aa, Homo sapiens
  Light chain CDR3 for antibody 12552 (IGKV1D-16)
QQYDSYPPT

SEQ ID NO: 25104 - protein, 17 aa, Homo sapiens
  Heavy chain CDR3 for antibody 12552 (IGHV1-18)
ARERYYGSGSYKYNMDV

SEQ ID NO: 25105 - protein, 9 aa, Homo sapiens
  Light chain CDR3 for antibody 12553 (IGKV1D-13)
QRFNNYLYT

SEQ ID NO: 25106 - protein, 9 aa, Homo sapiens
  Heavy chain CDR3 for antibody 12553 (IGHV4-59)
ARGGASFDY

SEQ ID NO: 25107 - protein, 9 aa, Homo sapiens
  Light chain CDR3 for antibody 12554 (IGKV1-9)
QQYNSYPYT

SEQ ID NO: 25108 - protein, 10 aa, Homo sapiens
  Heavy chain CDR3 for antibody 12554 (IGHV4-59)
ARDWNDAFDI

SEQ ID NO: 25109 - protein, 9 aa, Homo sapiens
  Light chain CDR3 for antibody 12555 (IGKV1-9)
QQLKSYLYT

SEQ ID NO: 25110 - protein, 11 aa, Homo sapiens
  Heavy chain CDR3 for antibody 12555 (IGHV3-33)
AREGAVARFDY

SEQ ID NO: 25111 - protein, 10 aa, Homo sapiens
  Light chain CDR3 for antibody 12556 (IGKV3-11)
QQRSNWLMYT

SEQ ID NO: 25112 - protein, 11 aa, Homo sapiens
  Heavy chain CDR3 for antibody 12556 (IGHV3-33)
ARDILTGFLDH

SEQ ID NO: 25113 - protein, 9 aa, Homo sapiens
  Light chain CDR3 for antibody 12557 (IGKV1-27)
QKYNSAPYT

SEQ ID NO: 25114 - protein, 17 aa, Homo sapiens
  Heavy chain CDR3 for antibody 12557 (IGHV3-13)
AREGWFGELWGYYGMDV

SEQ ID NO: 25115 - protein, 9 aa, Homo sapiens
  Light chain CDR3 for antibody 12558 (IGKV1-17)
LQHNSYPYT

SEQ ID NO: 25116 - protein, 16 aa, Homo sapiens
  Heavy chain CDR3 for antibody 12558 (IGHV4-59)
AGGSGSYRDYYYGIDV

SEQ ID NO: 25117 - protein, 10 aa, Homo sapiens
  Light chain CDR3 for antibody 12559 (IGKV3-15)
QQYNNWPPIT

SEQ ID NO: 25118 - protein, 17 aa, Homo sapiens
  Heavy chain CDR3 for antibody 12559 (IGHV4-59)
ARRITMVREIIITAFDY

SEQ ID NO: 25119 - protein, 9 aa, Homo sapiens
  Light chain CDR3 for antibody 12560 (IGKV1-9)
QQLKSYLYT

SEQ ID NO: 25120 - protein, 19 aa, Homo sapiens
  Heavy chain CDR3 for antibody 12560 (IGHV1-24)
ATAGLQWFGEKIGYYGMDV

SEQ ID NO: 25121 - protein, 8 aa, Homo sapiens
  Light chain CDR3 for antibody 12561 (IGKV1-5)
QQYNSYFT

SEQ ID NO: 25122 - protein, 22 aa, Homo sapiens
  Heavy chain CDR3 for antibody 12561 (IGHV3-30)
ATLPLCGGDCYSAHYRYYGMDV

SEQ ID NO: 25123 - protein, 9 aa, Homo sapiens
  Light chain CDR3 for antibody 12562 (IGKV1-6)
LQDYKSPFT

SEQ ID NO: 25124 - protein, 13 aa, Homo sapiens
  Heavy chain CDR3 for antibody 12562 (IGHV1-2)
ARDGVRGSFGMDV

SEQ ID NO: 25125 - protein, 9 aa, Homo sapiens
  Light chain CDR3 for antibody 12563 (IGKV1-39)
QQSYSTPIT

SEQ ID NO: 25126 - protein, 14 aa, Homo sapiens
  Heavy chain CDR3 for antibody 12563 (IGHV1-46)
ARDQPTVPSGYFDY

SEQ ID NO: 25127 - protein, 9 aa, Homo sapiens
  Light chain CDR3 for antibody 12564 (IGKV1D-13)
QQFNNYPYT

SEQ ID NO: 25128 - protein, 18 aa, Homo sapiens
  Heavy chain CDR3 for antibody 12564 (IGHV3-53)
AKAGDYYVSGSYWGYFDL

SEQ ID NO: 25129 - protein, 9 aa, Homo sapiens
  Light chain CDR3 for antibody 12565 (IGKV1-9)
QKYNSAPYT

SEQ ID NO: 25130 - protein, 14 aa, Homo sapiens
  Heavy chain CDR3 for antibody 12565 (IGHV3-33)
ARDAMGTSTAWFDP

SEQ ID NO: 25131 - protein, 8 aa, Homo sapiens
  Light chain CDR3 for antibody 12566 (IGKV3D-7)
QQDYNLLT

SEQ ID NO: 25132 - protein, 17 aa, Homo sapiens
  Heavy chain CDR3 for antibody 12566 (IGHV3-23)
AKEYCSGGSCYVYYFDY

SEQ ID NO: 25133 - protein, 9 aa, Homo sapiens
  Light chain CDR3 for antibody 12567 (IGKV1-17)
QQYNSYPLT

SEQ ID NO: 25134 - protein, 13 aa, Homo sapiens
  Heavy chain CDR3 for antibody 12567 (IGHV3-33)
ARDYGDYLNWFDP

SEQ ID NO: 25135 - protein, 9 aa, Homo sapiens
  Light chain CDR3 for antibody 12568 (IGKV1-9)
QQLISYPLT

SEQ ID NO: 25136 - protein, 23 aa, Homo sapiens
  Heavy chain CDR3 for antibody 12568 (IGHV3-h)
ARDRGITMVRGVITYYYFYGMDV

SEQ ID NO: 25137 - protein, 9 aa, Homo sapiens
  Light chain CDR3 for antibody 12569 (IGKV2D-28)
MQARQTPPT

SEQ ID NO: 25138 - protein, 10 aa, Homo sapiens
  Heavy chain CDR3 for antibody 12569 (IGHV3-33)
ARENSTPLDY

SEQ ID NO: 25139 - protein, 10 aa, Homo sapiens
  Light chain CDR3 for antibody 12570 (IGKV3-11)
QQRSNWPALT

SEQ ID NO: 25140 - protein, 9 aa, Homo sapiens
  Heavy chain CDR3 for antibody 12570 (IGHV3-33)
ARELAYFDY

SEQ ID NO: 25141 - protein, 8 aa, Homo sapiens
  Light chain CDR3 for antibody 12571 (IGKV6-21)
HQSSSLPT

SEQ ID NO: 25142 - protein, 13 aa, Homo sapiens
  Heavy chain CDR3 for antibody 12571 (IGHV3-21)
ARDSTLVRGVFPY

SEQ ID NO: 25143 - protein, 9 aa, Homo sapiens
  Light chain CDR3 for antibody 12572 (IGKV1-17)
LQHNSYPYT

SEQ ID NO: 25144 - protein, 14 aa, Homo sapiens
  Heavy chain CDR3 for antibody 12572 (IGHV4-39)
ARRGVIVPAAGFDP

SEQ ID NO: 25145 - protein, 9 aa, Homo sapiens
  Light chain CDR3 for antibody 12573 (IGKV3D-7)
QQDYEFPIT

SEQ ID NO: 25146 - protein, 14 aa, Homo sapiens
  Heavy chain CDR3 for antibody 12573 (IGHV4-39)
ARRGVLVPPGGMDV

SEQ ID NO: 25147 - protein, 8 aa, Homo sapiens
  Light chain CDR3 for antibody 12574 (IGKV6-21)
HQSSSLPT

SEQ ID NO: 25148 - protein, 18 aa, Homo sapiens
  Heavy chain CDR3 for antibody 12574 (IGHV3-23)
AKDRITGTTYGYYSGLDV

SEQ ID NO: 25149 - protein, 8 aa, Homo sapiens
  Light chain CDR3 for antibody 12575 (IGKV1D-13)
QQFNNYPT

SEQ ID NO: 25150 - protein, 20 aa, Homo sapiens
  Heavy chain CDR3 for antibody 12575 (IGHV3-33)
ARRMVRGVKKTYYYYYGLDV

SEQ ID NO: 25151 - protein, 9 aa, Homo sapiens
  Light chain CDR3 for antibody 12576 (IGKV1-39)
QQSYSSPFT

SEQ ID NO: 25152 - protein, 14 aa, Homo sapiens
  Heavy chain CDR3 for antibody 12576 (IGHV3-23)
AKSRIVGALYYFGY

SEQ ID NO: 25153 - protein, 9 aa, Homo sapiens
  Light chain CDR3 for antibody 12577 (IGKV1-6)
QQEYNYPLT

SEQ ID NO: 25154 - protein, 14 aa, Homo sapiens
  Heavy chain CDR3 for antibody 12577 (IGHV3-33)
ARDAYDILTGYYDY

SEQ ID NO: 25155 - protein, 9 aa, Homo sapiens
  Light chain CDR3 for antibody 12578 (IGKV3-11)
QQRSNWPYT

SEQ ID NO: 25156 - protein, 16 aa, Homo sapiens
  Heavy chain CDR3 for antibody 12578 (IGHV3-33)
ARDAGYPNYDYYGMDV

SEQ ID NO: 25157 - protein, 10 aa, Homo sapiens
  Light chain CDR3 for antibody 12579 (IGKV3-11)
QQRSNWPMYT

SEQ ID NO: 25158 - protein, 13 aa, Homo sapiens
  Heavy chain CDR3 for antibody 12579 (IGHV3-11)
ARDEGYRGYVLDT

SEQ ID NO: 25159 - protein, 9 aa, Homo sapiens
  Light chain CDR3 for antibody 12580 (IGKV1-39)
QQSYSTPLT

SEQ ID NO: 25160 - protein, 20 aa, Homo sapiens
  Heavy chain CDR3 for antibody 12580 (IGHV1-24)
AAHYDILTGSPYYYYCALDV

SEQ ID NO: 25161 - protein, 9 aa, Homo sapiens
  Light chain CDR3 for antibody 12581 (IGKV3-20)
QLSGSSLLT

SEQ ID NO: 25162 - protein, 14 aa, Homo sapiens
  Heavy chain CDR3 for antibody 12581 (IGHV4-59)
AKGGSGSYYNWFDP

SEQ ID NO: 25163 - protein, 9 aa, Homo sapiens
  Light chain CDR3 for antibody 12582 (IGKV4-1)
QQYYTTPPT

SEQ ID NO: 25164 - protein, 11 aa, Homo sapiens
  Heavy chain CDR3 for antibody 12582 (IGHV3-33)
ARARYTTGLDY

SEQ ID NO: 25165 - protein, 9 aa, Homo sapiens
  Light chain CDR3 for antibody 12583 (IGKV3-20)
QQYGSSPRT

SEQ ID NO: 25166 - protein, 13 aa, Homo sapiens
  Heavy chain CDR3 for antibody 12583 (IGHV4-59)
ARSWFGELLYFDY

SEQ ID NO: 25167 - protein, 10 aa, Homo sapiens
  Light chain CDR3 for antibody 12584 (IGKV1-39)
QQSYSTPMYT

SEQ ID NO: 25168 - protein, 14 aa, Homo sapiens
  Heavy chain CDR3 for antibody 12584 (IGHV3-33)
VRDAMGATPAWFDP

SEQ ID NO: 25169 - protein, 9 aa, Homo sapiens
  Light chain CDR3 for antibody 12585 (IGKV6-21)
HQSSSLPYT

SEQ ID NO: 25170 - protein, 14 aa, Homo sapiens
  Heavy chain CDR3 for antibody 12585 (IGHV3-64)
ARDGLRYFDWLWDY

SEQ ID NO: 25171 - protein, 9 aa, Homo sapiens
  Light chain CDR3 for antibody 12586 (IGKV2-30)
MQGTHWPLT

SEQ ID NO: 25172 - protein, 20 aa, Homo sapiens
  Heavy chain CDR3 for antibody 12586 (IGHV3-11)
AKDRETGTTSYHYYYYGMDV

SEQ ID NO: 25173 - protein, 9 aa, Homo sapiens
  Light chain CDR3 for antibody 12587 (IGKV4-1)
QQYYSTPYT

SEQ ID NO: 25174 - protein, 14 aa, Homo sapiens
  Heavy chain CDR3 for antibody 12587 (IGHV3-33)
ARASSGSSYWYFDL

SEQ ID NO: 25175 - protein, 9 aa, Homo sapiens
  Light chain CDR3 for antibody 12588 (IGKV1-37)
QRTSNAPYT

SEQ ID NO: 25176 - protein, 14 aa, Homo sapiens
  Heavy chain CDR3 for antibody 12588 (IGHV3-33)
ARTTAAAGPRDFQH

SEQ ID NO: 25177 - protein, 9 aa, Homo sapiens
  Light chain CDR3 for antibody 12589 (IGKV4-1)
QQYYSTPWT

SEQ ID NO: 25178 - protein, 19 aa, Homo sapiens
  Heavy chain CDR3 for antibody 12589 (IGHV3-33)
ARDSGYSGYDYYYYYGMDV

SEQ ID NO: 25179 - protein, 8 aa, Homo sapiens
  Light chain CDR3 for antibody 12590 (IGKV1D-13)
QQYNNYPT

SEQ ID NO: 25180 - protein, 17 aa, Homo sapiens
  Heavy chain CDR3 for antibody 12590 (IGHV3-33)
ARSMVTTYGYYYYGMDV

SEQ ID NO: 25181 - protein, 9 aa, Homo sapiens
  Light chain CDR3 for antibody 12591 (IGKV1-17)
LHSNNYPWT

SEQ ID NO: 25182 - protein, 18 aa, Homo sapiens
  Heavy chain CDR3 for antibody 12591 (IGHV1-46)
ARDGDYVWGSYRSDWFDP

SEQ ID NO: 25183 - protein, 9 aa, Homo sapiens
  Light chain CDR3 for antibody 12592 (IGKV3-11)
QQRSNWPRT

SEQ ID NO: 25184 - protein, 17 aa, Homo sapiens
  Heavy chain CDR3 for antibody 12592 (IGHV1-8)
ARGDYYGSGSPYWYFDL

SEQ ID NO: 25185 - protein, 9 aa, Homo sapiens
  Light chain CDR3 for antibody 12593 (IGKV3D-7)
QQDYNLPYT

SEQ ID NO: 25186 - protein, 15 aa, Homo sapiens
  Heavy chain CDR3 for antibody 12593 (IGHV4-39)
ARRSKYSSAWYPFDY

SEQ ID NO: 25187 - protein, 9 aa, Homo sapiens
  Light chain CDR3 for antibody 12594 (IGKV1-6)
LQDYNYPRT

SEQ ID NO: 25188 - protein, 7 aa, Homo sapiens
  Heavy chain CDR3 for antibody 12594 (IGHV3-33)
ARELFDS

SEQ ID NO: 25189 - protein, 9 aa, Homo sapiens
  Light chain CDR3 for antibody 12595 (IGKV3D-7)
QQSYSTPLT

SEQ ID NO: 25190 - protein, 12 aa, Homo sapiens
  Heavy chain CDR3 for antibody 12595 (IGHV3-33)
ARDYGSGSFFDY

SEQ ID NO: 25191 - protein, 9 aa, Homo sapiens
  Light chain CDR3 for antibody 12596 (IGKV1-17)
LQQNSYPWT

SEQ ID NO: 25192 - protein, 15 aa, Homo sapiens
  Heavy chain CDR3 for antibody 12596 (IGHV3-33)
ARDSRPEIIGPPFDY

SEQ ID NO: 25193 - protein, 10 aa, Homo sapiens
  Light chain CDR3 for antibody 12597 (IGKV1-39)
QQSYSTPMYT

SEQ ID NO: 25194 - protein, 15 aa, Homo sapiens
  Heavy chain CDR3 for antibody 12597 (IGHV3-33)
ARDEHYDILTGYWGY

SEQ ID NO: 25195 - protein, 9 aa, Homo sapiens
  Light chain CDR3 for antibody 12598 (IGKV1D-16)
QQYHSYPYT

SEQ ID NO: 25196 - protein, 17 aa, Homo sapiens
  Heavy chain CDR3 for antibody 12598 (IGHV1-18)
ARERYYGSGGYKYNMDD

SEQ ID NO: 25197 - protein, 9 aa, Homo sapiens
  Light chain CDR3 for antibody 12599 (IGKV1-17)
LQLNSFPWT

SEQ ID NO: 25198 - protein, 11 aa, Homo sapiens
  Heavy chain CDR3 for antibody 12599 (IGHV3-33)
ARARYTTGLDY

SEQ ID NO: 25199 - protein, 9 aa, Homo sapiens
  Light chain CDR3 for antibody 12600 (IGKV1-16)
QQYSSYPYT

SEQ ID NO: 25200 - protein, 19 aa, Homo sapiens
  Heavy chain CDR3 for antibody 12600 (IGHV3-33)
ARDSGYSGYDYYYYYGIDV

SEQ ID NO: 25201 - protein, 9 aa, Homo sapiens
  Light chain CDR3 for antibody 12601 (IGKV1-6)
LQDYKSPFT

SEQ ID NO: 25202 - protein, 18 aa, Homo sapiens
  Heavy chain CDR3 for antibody 12601 (IGHV3-33)
ARERGYYGSDIYPAAFDI

SEQ ID NO: 25203 - protein, 9 aa, Homo sapiens
  Light chain CDR3 for antibody 12602 (IGKV2D-28)
MQVLQTPFT

SEQ ID NO: 25204 - protein, 23 aa, Homo sapiens
  Heavy chain CDR3 for antibody 12602 (IGHV4-59)
ARERTYSDILPGYYEDYYYGMDV

SEQ ID NO: 25205 - protein, 9 aa, Homo sapiens
  Light chain CDR3 for antibody 12603 (IGKV2D-28)
MQALQTPRT

SEQ ID NO: 25206 - protein, 12 aa, Homo sapiens
  Heavy chain CDR3 for antibody 12603 (IGHV3-33)
AREGIAVAGVDP

SEQ ID NO: 25207 - protein, 8 aa, Homo sapiens
  Light chain CDR3 for antibody 12604 (IGKV1D-13)
QQFNNYPT

SEQ ID NO: 25208 - protein, 17 aa, Homo sapiens
  Heavy chain CDR3 for antibody 12604 (IGHV3-33)
ARDSYDILTGYYKPFDY

SEQ ID NO: 25209 - protein, 10 aa, Homo sapiens
  Light chain CDR3 for antibody 12605 (IGKV1-39)
QQSYSTPMYT

SEQ ID NO: 25210 - protein, 13 aa, Homo sapiens
  Heavy chain CDR3 for antibody 12605 (IGHV1-46)
ARRQVGYYYGMDV

SEQ ID NO: 25211 - protein, 8 aa, Homo sapiens
  Light chain CDR3 for antibody 12606 (IGKV1-5)
QQYNSYYT

SEQ ID NO: 25212 - protein, 15 aa, Homo sapiens
  Heavy chain CDR3 for antibody 12606 (IGHV3-74)
SRGSGSHYFYYGMDV

SEQ ID NO: 25213 - protein, 9 aa, Homo sapiens
  Light chain CDR3 for antibody 12607 (IGKV1-6)
LQDYNHPFT

SEQ ID NO: 25214 - protein, 17 aa, Homo sapiens
  Heavy chain CDR3 for antibody 12607 (IGHV3-33)
ARVYYDILTGYYWYFDL

SEQ ID NO: 25215 - protein, 9 aa, Homo sapiens
  Light chain CDR3 for antibody 12608 (IGKV3D-7)
KQDYNLPWT

SEQ ID NO: 25216 - protein, 17 aa, Homo sapiens
  Heavy chain CDR3 for antibody 12608 (IGHV1-18)
ARERYYGSGSYKYNMDV

SEQ ID NO: 25217 - protein, 8 aa, Homo sapiens
  Light chain CDR3 for antibody 12609 (IGKV3-20)
QQYGSSLT

SEQ ID NO: 25218 - protein, 10 aa, Homo sapiens
  Heavy chain CDR3 for antibody 12609 (IGHV3-30)
AREWYGGMDV

SEQ ID NO: 25219 - protein, 9 aa, Homo sapiens
  Light chain CDR3 for antibody 12610 (IGKV3-11)
QQRSNWPWT

SEQ ID NO: 25220 - protein, 7 aa, Homo sapiens
  Heavy chain CDR3 for antibody 12610 (IGHV3-33)
ARDYGDY

SEQ ID NO: 25221 - protein, 9 aa, Homo sapiens
  Light chain CDR3 for antibody 12611 (IGKV3D-7)
QQDYNLPYS

SEQ ID NO: 25222 - protein, 15 aa, Homo sapiens
  Heavy chain CDR3 for antibody 12611 (IGHV3-20)
ARDRGSSGWRDWFDP

SEQ ID NO: 25223 - protein, 9 aa, Homo sapiens
  Light chain CDR3 for antibody 12612 (IGKV1D-13)
QQFNNYPYT

SEQ ID NO: 25224 - protein, 15 aa, Homo sapiens
  Heavy chain CDR3 for antibody 12612 (IGHV1-46)
ARGAVDDYYYYGMDV

SEQ ID NO: 25225 - protein, 9 aa, Homo sapiens
  Light chain CDR3 for antibody 12613 (IGKV3-11)
QQRSNWPPT

SEQ ID NO: 25226 - protein, 17 aa, Homo sapiens
  Heavy chain CDR3 for antibody 12613 (IGHV3-33)
TRDSGMVRGIIIYGMDV

SEQ ID NO: 25227 - protein, 9 aa, Homo sapiens
  Light chain CDR3 for antibody 12614 (IGKV3-20)
QQYGSSPYT

SEQ ID NO: 25228 - protein, 12 aa, Homo sapiens
  Heavy chain CDR3 for antibody 12614 (IGHV4-39)
ALDEWPPSWYKY

SEQ ID NO: 25229 - protein, 8 aa, Homo sapiens
  Light chain CDR3 for antibody 12615 (IGKV3-11)
LQRGNWPT

SEQ ID NO: 25230 - protein, 14 aa, Homo sapiens
  Heavy chain CDR3 for antibody 12615 (IGHV3-33)
ARDWNDVYYYGMDV

SEQ ID NO: 25231 - protein, 9 aa, Homo sapiens
  Light chain CDR3 for antibody 12616 (IGKV2-30)
MQGTHWPLT

SEQ ID NO: 25232 - protein, 18 aa, Homo sapiens
  Heavy chain CDR3 for antibody 12616 (IGHV1-8)
AREGAAAGSYYYYNGMDV

SEQ ID NO: 25233 - protein, 9 aa, Homo sapiens
  Light chain CDR3 for antibody 12617 (IGKV2-30)
MQGTHWPLT

SEQ ID NO: 25234 - protein, 17 aa, Homo sapiens
  Heavy chain CDR3 for antibody 12617 (IGHV3-33)
ARVRGVIEGYYYYGMDV

SEQ ID NO: 25235 - protein, 9 aa, Homo sapiens
  Light chain CDR3 for antibody 12618 (IGKV1-9)
QQLKSYTYT

SEQ ID NO: 25236 - protein, 15 aa, Homo sapiens
  Heavy chain CDR3 for antibody 12618 (IGHV3-33)
ARRGYNDYDPYGMDV

SEQ ID NO: 25237 - protein, 9 aa, Homo sapiens
  Light chain CDR3 for antibody 12619 (IGKV3-15)
QQYINWPLT

SEQ ID NO: 25238 - protein, 15 aa, Homo sapiens
  Heavy chain CDR3 for antibody 12619 (IGHV3-23)
AKDRKYDFLTGPFDP

SEQ ID NO: 25239 - protein, 9 aa, Homo sapiens
  Light chain CDR3 for antibody 12620 (IGKV1-17)
LQHNSYPYT

SEQ ID NO: 25240 - protein, 14 aa, Homo sapiens
  Heavy chain CDR3 for antibody 12620 (IGHV3-66)
ARDRDYYYYYGMDV

SEQ ID NO: 25241 - protein, 9 aa, Homo sapiens
  Light chain CDR3 for antibody 12621 (IGKV1-9)
QQVKSYPYT

SEQ ID NO: 25242 - protein, 9 aa, Homo sapiens
  Heavy chain CDR3 for antibody 12621 (IGHV1-46)
ARDNWGFDY

SEQ ID NO: 25243 - protein, 10 aa, Homo sapiens
  Light chain CDR3 for antibody 12622 (IGKV3-20)
QQYGSSPPYT

SEQ ID NO: 25244 - protein, 17 aa, Homo sapiens
  Heavy chain CDR3 for antibody 12622 (IGHV3-33)
ARGFSGYDGYYYYGMDV

SEQ ID NO: 25245 - protein, 9 aa, Homo sapiens
  Light chain CDR3 for antibody 12623 (IGKV1-33)
QKYNSAPYT

SEQ ID NO: 25246 - protein, 24 aa, Homo sapiens
  Heavy chain CDR3 for antibody 12623 (IGHV3-20)
ARGRITMVRGVIIDPLDYYNGMDV

SEQ ID NO: 25247 - protein, 10 aa, Homo sapiens
  Light chain CDR3 for antibody 12624 (IGKV1-17)
QQSYSTPMYT

SEQ ID NO: 25248 - protein, 14 aa, Homo sapiens
  Heavy chain CDR3 for antibody 12624 (IGHV1-24)
ATWLPLYYYYGMDV

SEQ ID NO: 25249 - protein, 9 aa, Homo sapiens
  Light chain CDR3 for antibody 12625 (IGKV1-13)
HQSTSLPFT

SEQ ID NO: 25250 - protein, 14 aa, Homo sapiens
  Heavy chain CDR3 for antibody 12625 (IGHV4-39)
ARHGYDILTGPFDY

SEQ ID NO: 25251 - protein, 9 aa, Homo sapiens
  Light chain CDR3 for antibody 12626 (IGKV1-6)
LQDFHYPWT

SEQ ID NO: 25252 - protein, 13 aa, Homo sapiens
  Heavy chain CDR3 for antibody 12626 (IGHV3-53)
ARSGSYWGYYFDY

SEQ ID NO: 25253 - protein, 9 aa, Homo sapiens
  Light chain CDR3 for antibody 12627 (IGKV1-9)
QQLYTYPYT

SEQ ID NO: 25254 - protein, 15 aa, Homo sapiens
  Heavy chain CDR3 for antibody 12627 (IGHV3-33)
ARDRGSSGWRDWFDP

SEQ ID NO: 25255 - protein, 9 aa, Homo sapiens
  Light chain CDR3 for antibody 12628 (IGKV3-11)
QQRSSWPPT

SEQ ID NO: 25256 - protein, 12 aa, Homo sapiens
  Heavy chain CDR3 for antibody 12628 (IGHV4-59)
ARDRSGWAYFDY

SEQ ID NO: 25257 - protein, 9 aa, Homo sapiens
  Light chain CDR3 for antibody 12629 (IGKV1-9)
QQLNSYPWT

SEQ ID NO: 25258 - protein, 13 aa, Homo sapiens
  Heavy chain CDR3 for antibody 12629 (IGHV1-18)
ARITMVRGVSFDY

SEQ ID NO: 25259 - protein, 9 aa, Homo sapiens
  Light chain CDR3 for antibody 12630 (IGKV3-20)
QQYGTSPFP

SEQ ID NO: 25260 - protein, 14 aa, Homo sapiens
  Heavy chain CDR3 for antibody 12630 (IGHV3-33)
ARDRIAAASSDFDC

SEQ ID NO: 25261 - protein, 9 aa, Homo sapiens
  Light chain CDR3 for antibody 12631 (IGKV1-9)
QQLTSFPRT

SEQ ID NO: 25262 - protein, 12 aa, Homo sapiens
  Heavy chain CDR3 for antibody 12631 (IGHV3-13)
ARDRGYSGYFDY

SEQ ID NO: 25263 - protein, 9 aa, Homo sapiens
  Light chain CDR3 for antibody 12632 (IGKV3-15)
QQYHDWPLT

SEQ ID NO: 25264 - protein, 20 aa, Homo sapiens
  Heavy chain CDR3 for antibody 12632 (IGHV3-11)
ARGGATLIRGLIDYYYGMDV

SEQ ID NO: 25265 - protein, 9 aa, Homo sapiens
  Light chain CDR3 for antibody 12633 (IGKV1-6)
LQDFHYPWT

SEQ ID NO: 25266 - protein, 17 aa, Homo sapiens
  Heavy chain CDR3 for antibody 12633 (IGHV3-33)
ARDLIGPLSSSWYPFDY

SEQ ID NO: 25267 - protein, 10 aa, Homo sapiens
  Light chain CDR3 for antibody 12634 (IGKV1-17)
LQHNSYPMYT

SEQ ID NO: 25268 - protein, 12 aa, Homo sapiens
  Heavy chain CDR3 for antibody 12634 (IGHV3-33)
AREGTGGNWFDP

SEQ ID NO: 25269 - protein, 10 aa, Homo sapiens
  Light chain CDR3 for antibody 12635 (IGKV1-17)
LQHNSYPMYT

SEQ ID NO: 25270 - protein, 10 aa, Homo sapiens
  Heavy chain CDR3 for antibody 12635 (IGHV3-23)
ARDLGWSFDF

SEQ ID NO: 25271 - protein, 10 aa, Homo sapiens
  Light chain CDR3 for antibody 12636 (IGKV3-20)
QQYGSSPPYT

SEQ ID NO: 25272 - protein, 15 aa, Homo sapiens
  Heavy chain CDR3 for antibody 12636 (IGHV3-21)
ARGYYYGSGSFPFDY

SEQ ID NO: 25273 - protein, 9 aa, Homo sapiens
  Light chain CDR3 for antibody 12637 (IGKV2D-24)
TQATQFPHT

SEQ ID NO: 25274 - protein, 12 aa, Homo sapiens
  Heavy chain CDR3 for antibody 12637 (IGHV3-33)
ARDRAYRGSLDY

SEQ ID NO: 25275 - protein, 9 aa, Homo sapiens
  Light chain CDR3 for antibody 12638 (IGKV1-6)
LQDYNYPYT

SEQ ID NO: 25276 - protein, 9 aa, Homo sapiens
  Heavy chain CDR3 for antibody 12638 (IGHV3-74)
ARSEYQPTY

SEQ ID NO: 25277 - protein, 8 aa, Homo sapiens
  Light chain CDR3 for antibody 12639 (IGKV6-21)
HQSSSLPT

SEQ ID NO: 25278 - protein, 17 aa, Homo sapiens
  Heavy chain CDR3 for antibody 12639 (IGHV3-33)
ARDWFGELSDYYYGMDV

SEQ ID NO: 25279 - protein, 9 aa, Homo sapiens
  Light chain CDR3 for antibody 12640 (IGKV3-20)
QQYGSSPYT

SEQ ID NO: 25280 - protein, 19 aa, Homo sapiens
  Heavy chain CDR3 for antibody 12640 (IGHV4-39)
ARQGDVLRYFDWLLGAFDI

SEQ ID NO: 25281 - protein, 10 aa, Homo sapiens
  Light chain CDR3 for antibody 12641 (IGKV1-39)
QQSYSTPMYT

SEQ ID NO: 25282 - protein, 11 aa, Homo sapiens
  Heavy chain CDR3 for antibody 12641 (IGHV4-59)
ARDRGHYGMDV

SEQ ID NO: 25283 - protein, 9 aa, Homo sapiens
  Light chain CDR3 for antibody 12642 (IGKV1-17)
LHSNNYPWT

SEQ ID NO: 25284 - protein, 17 aa, Homo sapiens
  Heavy chain CDR3 for antibody 12642 (IGHV3-33)
ARDSYDILTGYYKPFDY

SEQ ID NO: 25285 - protein, 8 aa, Homo sapiens
  Light chain CDR3 for antibody 12643 (IGKV1-5)
QQYNSYYT

SEQ ID NO: 25286 - protein, 15 aa, Homo sapiens
  Heavy chain CDR3 for antibody 12643 (IGHV4-39)
ARHSGYSSGWYPFDY

SEQ ID NO: 25287 - protein, 9 aa, Homo sapiens
  Light chain CDR3 for antibody 12644 (IGKV1-6)
LQDYIYPRT

SEQ ID NO: 25288 - protein, 15 aa, Homo sapiens
  Heavy chain CDR3 for antibody 12644 (IGHV3-23)
AKDGSYSYYYYGMDV

SEQ ID NO: 25289 - protein, 8 aa, Homo sapiens
  Light chain CDR3 for antibody 12645 (IGKV3D-7)
QQDYNLLT

SEQ ID NO: 25290 - protein, 16 aa, Homo sapiens
  Heavy chain CDR3 for antibody 12645 (IGHV3-33)
AKDAFYYGSGSHLFDY

SEQ ID NO: 25291 - protein, 9 aa, Homo sapiens
  Light chain CDR3 for antibody 12646 (IGKV2D-28)
MQVLQTPFT

SEQ ID NO: 25292 - protein, 10 aa, Homo sapiens
  Heavy chain CDR3 for antibody 12646 (IGHV4-39)
ARQLGNWFDP

SEQ ID NO: 25293 - protein, 10 aa, Homo sapiens
  Light chain CDR3 for antibody 12647 (IGKV3-20)
QQYGRSPPVT

SEQ ID NO: 25294 - protein, 7 aa, Homo sapiens
  Heavy chain CDR3 for antibody 12647 (IGHV1-46)
AREGGDY

SEQ ID NO: 25295 - protein, 9 aa, Homo sapiens
  Light chain CDR3 for antibody 12648 (IGKV1D-16)
QQYNSYPYT

SEQ ID NO: 25296 - protein, 16 aa, Homo sapiens
  Heavy chain CDR3 for antibody 12648 (IGHV3-33)
ARDRIAAAGNFYGLDV

SEQ ID NO: 25297 - protein, 9 aa, Homo sapiens
  Light chain CDR3 for antibody 12649 (IGKV1-6)
LQDYKSPFT

SEQ ID NO: 25298 - protein, 8 aa, Homo sapiens
  Heavy chain CDR3 for antibody 12649 (IGHV3-33)
ARDRGFDY

SEQ ID NO: 25299 - protein, 9 aa, Homo sapiens
  Light chain CDR3 for antibody 12650 (IGKV1-27)
QKYNSAPYT

SEQ ID NO: 25300 - protein, 19 aa, Homo sapiens
  Heavy chain CDR3 for antibody 12650 (IGHV1-18)
ARGGHIGVVTAFHGYGMDV

SEQ ID NO: 25301 - protein, 9 aa, Homo sapiens
  Light chain CDR3 for antibody 12651 (IGKV5-2)
LQHDNFPWT

SEQ ID NO: 25302 - protein, 10 aa, Homo sapiens
  Heavy chain CDR3 for antibody 12651 (IGHV3-72)
CRDREGFGDV

SEQ ID NO: 25303 - protein, 9 aa, Homo sapiens
  Light chain CDR3 for antibody 12652 (IGKV1-6)
LQDYNYPRT

SEQ ID NO: 25304 - protein, 22 aa, Homo sapiens
  Heavy chain CDR3 for antibody 12652 (IGHV1-18)
ARDRYNKQSKYSNRDYYYGLDV

SEQ ID NO: 25305 - protein, 9 aa, Homo sapiens
  Light chain CDR3 for antibody 12653 (IGKV1-39)
QQSYSTPLT

SEQ ID NO: 25306 - protein, 19 aa, Homo sapiens
  Heavy chain CDR3 for antibody 12653 (IGHV3-20)
ARDSAVAGRYYYYYYGMDV

SEQ ID NO: 25307 - protein, 8 aa, Homo sapiens
  Light chain CDR3 for antibody 12654 (IGKV2D-28)
MQALQTPT

SEQ ID NO: 25308 - protein, 17 aa, Homo sapiens
  Heavy chain CDR3 for antibody 12654 (IGHV3-23)
AKDTITMVRGALFGMDV

SEQ ID NO: 25309 - protein, 9 aa, Homo sapiens
  Light chain CDR3 for antibody 12655 (IGKV5-2)
LQHDKFPYT

SEQ ID NO: 25310 - protein, 17 aa, Homo sapiens
  Heavy chain CDR3 for antibody 12655 (IGHV1-24)
TTVVLYYDILPGYSFDY

SEQ ID NO: 25311 - protein, 9 aa, Homo sapiens
  Light chain CDR3 for antibody 12656 (IGKV1-16)
QQYHSYPYT

SEQ ID NO: 25312 - protein, 9 aa, Homo sapiens
  Heavy chain CDR3 for antibody 12656 (IGHV4-59)
AREGGSGGL

SEQ ID NO: 25313 - protein, 9 aa, Homo sapiens
  Light chain CDR3 for antibody 12657 (IGKV2-30)
MQGTHWPLT

SEQ ID NO: 25314 - protein, 16 aa, Homo sapiens
  Heavy chain CDR3 for antibody 12657 (IGHV3-11)
ARDSELRYFDWFGMDV

SEQ ID NO: 25315 - protein, 9 aa, Homo sapiens
  Light chain CDR3 for antibody 12658 (IGKV1-39)
QQSYSTPLT

SEQ ID NO: 25316 - protein, 12 aa, Homo sapiens
  Heavy chain CDR3 for antibody 12658 (IGHV3-33)
ARDPGYFFGLDV

SEQ ID NO: 25317 - protein, 9 aa, Homo sapiens
  Light chain CDR3 for antibody 12659 (IGKV1-6)
LQDYNYPPT

SEQ ID NO: 25318 - protein, 16 aa, Homo sapiens
  Heavy chain CDR3 for antibody 12659 (IGHV3-33)
ARDLVGATTYYYGMDV

SEQ ID NO: 25319 - protein, 10 aa, Homo sapiens
  Light chain CDR3 for antibody 12660 (IGKV1-17)
LQHNSYPMYT

SEQ ID NO: 25320 - protein, 17 aa, Homo sapiens
  Heavy chain CDR3 for antibody 12660 (IGHV3-23)
AKDYDILTGYSHNWFDP

SEQ ID NO: 25321 - protein, 8 aa, Homo sapiens
  Light chain CDR3 for antibody 12661 (IGKV1-5)
QQYNSYWT

SEQ ID NO: 25322 - protein, 12 aa, Homo sapiens
  Heavy chain CDR3 for antibody 12661 (IGHV3-33)
ASRDILTGYLGY

SEQ ID NO: 25323 - protein, 8 aa, Homo sapiens
  Light chain CDR3 for antibody 12662 (IGKV1D-13)
QQFNNYPT

SEQ ID NO: 25324 - protein, 13 aa, Homo sapiens
  Heavy chain CDR3 for antibody 12662 (IGHV3-33)
ARCIVAAMGGFDY

SEQ ID NO: 25325 - protein, 9 aa, Homo sapiens
  Light chain CDR3 for antibody 12663 (IGKV1D-16)
QQYNSNPLT

SEQ ID NO: 25326 - protein, 19 aa, Homo sapiens
  Heavy chain CDR3 for antibody 12663 (IGHV4-59)
ARGRGSYYYGPGSHNGMDV

SEQ ID NO: 25327 - protein, 9 aa, Homo sapiens
  Light chain CDR3 for antibody 12664 (IGKV2-30)
MQGTHWPLT

SEQ ID NO: 25328 - protein, 15 aa, Homo sapiens
  Heavy chain CDR3 for antibody 12664 (IGHV3-23)
AKDLSSGWYAYFFDY

SEQ ID NO: 25329 - protein, 9 aa, Homo sapiens
  Light chain CDR3 for antibody 12665 (IGKV1-9)
QQLNSYPLT

SEQ ID NO: 25330 - protein, 17 aa, Homo sapiens
  Heavy chain CDR3 for antibody 12665 (IGHV3-33)
ARQGVLLWSGELYYFDY

SEQ ID NO: 25331 - protein, 10 aa, Homo sapiens
  Light chain CDR3 for antibody 12666 (IGKV3-11)
QQRSNWPIFT

SEQ ID NO: 25332 - protein, 19 aa, Homo sapiens
  Heavy chain CDR3 for antibody 12666 (IGHV1-24)
ATAGLQWFGEKIGYYGMDV

SEQ ID NO: 25333 - protein, 8 aa, Homo sapiens
  Light chain CDR3 for antibody 12667 (IGKV3-11)
QQRSNWLT

SEQ ID NO: 25334 - protein, 10 aa, Homo sapiens
  Heavy chain CDR3 for antibody 12667 (IGHV3-33)
ARDGSGSQPI

SEQ ID NO: 25335 - protein, 8 aa, Homo sapiens
  Light chain CDR3 for antibody 12668 (IGKV2D-28)
MQALQTPT

SEQ ID NO: 25336 - protein, 18 aa, Homo sapiens
  Heavy chain CDR3 for antibody 12668 (IGHV4-59)
AREGHYYTSGSYYKAFDY

SEQ ID NO: 25337 - protein, 9 aa, Homo sapiens
  Light chain CDR3 for antibody 12669 (IGKV1-6)
LQDYNYPYT

SEQ ID NO: 25338 - protein, 15 aa, Homo sapiens
  Heavy chain CDR3 for antibody 12669 (IGHV3-23)
AKDENYYDYYYGMDV

SEQ ID NO: 25339 - protein, 9 aa, Homo sapiens
  Light chain CDR3 for antibody 12670 (IGKV3D-7)
QQDYNLPLT

SEQ ID NO: 25340 - protein, 11 aa, Homo sapiens
  Heavy chain CDR3 for antibody 12670 (IGHV3-33)
ARDRGYSYFDY

SEQ ID NO: 25341 - protein, 9 aa, Homo sapiens
  Light chain CDR3 for antibody 12671 (IGKV1D-16)
QQYYSYPRT

SEQ ID NO: 25342 - protein, 13 aa, Homo sapiens
  Heavy chain CDR3 for antibody 12671 (IGHV4-39)
ARHEVMVRGVFDY

SEQ ID NO: 25343 - protein, 9 aa, Homo sapiens
  Light chain CDR3 for antibody 12672 (IGKV1-9)
QQFNSYTRT

SEQ ID NO: 25344 - protein, 13 aa, Homo sapiens
  Heavy chain CDR3 for antibody 12672 (IGHV3-33)
ARDYCGGDCYLDY

SEQ ID NO: 25345 - protein, 8 aa, Homo sapiens
  Light chain CDR3 for antibody 12673 (IGKV3D-7)
QQDYNLLT

SEQ ID NO: 25346 - protein, 17 aa, Homo sapiens
  Heavy chain CDR3 for antibody 12673 (IGHV3-23)
ANGGFGESHYNYYCMDV

SEQ ID NO: 25347 - protein, 8 aa, Homo sapiens
  Light chain CDR3 for antibody 12674 (IGKV1-5)
QQYNSYYT

SEQ ID NO: 25348 - protein, 18 aa, Homo sapiens
  Heavy chain CDR3 for antibody 12674 (IGHV3-33)
ARDEYYGSGIYYNYGMDV

SEQ ID NO: 25349 - protein, 9 aa, Homo sapiens
  Light chain CDR3 for antibody 12675 (IGKV1-6)
LQDFHYPWT

SEQ ID NO: 25350 - protein, 14 aa, Homo sapiens
  Heavy chain CDR3 for antibody 12675 (IGHV1-46)
ARDGVGAKEGGSDY

SEQ ID NO: 25351 - protein, 9 aa, Homo sapiens
  Light chain CDR3 for antibody 12676 (IGKV1-39)
QQSYSTPFT

SEQ ID NO: 25352 - protein, 17 aa, Homo sapiens
  Heavy chain CDR3 for antibody 12676 (IGHV4-61)
ARNTMVGTWQRQGNLDH

SEQ ID NO: 25353 - protein, 9 aa, Homo sapiens
  Light chain CDR3 for antibody 12677 (IGKV1-27)
QKYNSAPHT

SEQ ID NO: 25354 - protein, 8 aa, Homo sapiens
  Heavy chain CDR3 for antibody 12677 (IGHV3-33)
ARDRGFDY

SEQ ID NO: 25355 - protein, 10 aa, Homo sapiens
  Light chain CDR3 for antibody 12678 (IGKV3-11)
QQRSNWPIFT

SEQ ID NO: 25356 - protein, 18 aa, Homo sapiens
  Heavy chain CDR3 for antibody 12678 (IGHV4-59)
ARERGNWNDVDYYYGMDV

SEQ ID NO: 25357 - protein, 9 aa, Homo sapiens
  Light chain CDR3 for antibody 12679 (IGKV1-39)
QQSYRTPLT

SEQ ID NO: 25358 - protein, 13 aa, Homo sapiens
  Heavy chain CDR3 for antibody 12679 (IGHV4-39)
ARRDGSYYGYFDY

SEQ ID NO: 25359 - protein, 10 aa, Homo sapiens
  Light chain CDR3 for antibody 12680 (IGKV1-17)
LQHNSYPIYT

SEQ ID NO: 25360 - protein, 16 aa, Homo sapiens
  Heavy chain CDR3 for antibody 12680 (IGHV3-20)
ARDSSSLDYYYYGMDV

SEQ ID NO: 25361 - protein, 9 aa, Homo sapiens
  Light chain CDR3 for antibody 12681 (IGKV3-15)
QQYDNLPFT

SEQ ID NO: 25362 - protein, 11 aa, Homo sapiens
  Heavy chain CDR3 for antibody 12681 (IGHV3-23)
GEFSSGWSFDY

SEQ ID NO: 25363 - protein, 9 aa, Homo sapiens
  Light chain CDR3 for antibody 12682 (IGKV1-6)
LQDYNYPYT

SEQ ID NO: 25364 - protein, 14 aa, Homo sapiens
  Heavy chain CDR3 for antibody 12682 (IGHV3-66)
ARDRDYYYYYGMDV

SEQ ID NO: 25365 - protein, 9 aa, Homo sapiens
  Light chain CDR3 for antibody 12683 (IGKV6-21)
HQSSSLPWT

SEQ ID NO: 25366 - protein, 16 aa, Homo sapiens
  Heavy chain CDR3 for antibody 12683 (IGHV3-33)
ARDQGILTGYYTAFDY

SEQ ID NO: 25367 - protein, 9 aa, Homo sapiens
  Light chain CDR3 for antibody 12684 (IGKV3-11)
QHRGNWPLT

SEQ ID NO: 25368 - protein, 18 aa, Homo sapiens
  Heavy chain CDR3 for antibody 12684 (IGHV4-34)
AREGHYYTSGSYYKAFDY

SEQ ID NO: 25369 - protein, 9 aa, Homo sapiens
  Light chain CDR3 for antibody 12685 (IGKV1-39)
QQSYSTPFT

SEQ ID NO: 25370 - protein, 14 aa, Homo sapiens
  Heavy chain CDR3 for antibody 12685 (IGHV3-33)
ARDWNDVYYYAMDV

SEQ ID NO: 25371 - protein, 9 aa, Homo sapiens
  Light chain CDR3 for antibody 12686 (IGKV2D-28)
MQALQTPPT

SEQ ID NO: 25372 - protein, 18 aa, Homo sapiens
  Heavy chain CDR3 for antibody 12686 (IGHV3-23)
ARYHLYFGSGFGSDGMDV

SEQ ID NO: 25373 - protein, 9 aa, Homo sapiens
  Light chain CDR3 for antibody 12687 (IGKV3D-20)
QQHGTSPLT

SEQ ID NO: 25374 - protein, 14 aa, Homo sapiens
  Heavy chain CDR3 for antibody 12687 (IGHV1-18)
ARCFGSGSYGWFDP

SEQ ID NO: 25375 - protein, 10 aa, Homo sapiens
  Light chain CDR3 for antibody 12688 (IGKV3-15)
QQYNNWPPLT

SEQ ID NO: 25376 - protein, 11 aa, Homo sapiens
  Heavy chain CDR3 for antibody 12688 (IGHV4-39)
AREAYYYGLDV

SEQ ID NO: 25377 - protein, 10 aa, Homo sapiens
  Light chain CDR3 for antibody 12689 (IGKV3-11)
QQRSNWPALA

SEQ ID NO: 25378 - protein, 14 aa, Homo sapiens
  Heavy chain CDR3 for antibody 12689 (IGHV3-33)
ARDNILTGYYLFDY

SEQ ID NO: 25379 - protein, 10 aa, Homo sapiens
  Light chain CDR3 for antibody 12690 (IGKV1-27)
QKYNSAPMYT

SEQ ID NO: 25380 - protein, 17 aa, Homo sapiens
  Heavy chain CDR3 for antibody 12690 (IGHV4-39)
ARVLRYFDWLSHDAFDI

SEQ ID NO: 25381 - protein, 10 aa, Homo sapiens
  Light chain CDR3 for antibody 12691 (IGKV3-11)
QQRSTWPTLI

SEQ ID NO: 25382 - protein, 18 aa, Homo sapiens
  Heavy chain CDR3 for antibody 12691 (IGHV6-1)
ARDQYSYGPYYYYYGMDV

SEQ ID NO: 25383 - protein, 9 aa, Homo sapiens
  Light chain CDR3 for antibody 12692 (IGKV1-6)
QQEYNYPLT

SEQ ID NO: 25384 - protein, 10 aa, Homo sapiens
  Heavy chain CDR3 for antibody 12692 (IGHV1-18)
AREQRLGFDY

SEQ ID NO: 25385 - protein, 9 aa, Homo sapiens
  Light chain CDR3 for antibody 12693 (IGKV1-17)
QQYGSSPYT

SEQ ID NO: 25386 - protein, 9 aa, Homo sapiens
  Heavy chain CDR3 for antibody 12693 (IGHV3-33)
ARGPYYDIL

SEQ ID NO: 25387 - protein, 9 aa, Homo sapiens
  Light chain CDR3 for antibody 12694 (IGKV3D-7)
QQDYNLPLT

SEQ ID NO: 25388 - protein, 12 aa, Homo sapiens
  Heavy chain CDR3 for antibody 12694 (IGHV3-23)
AKESLYSPTDDY

SEQ ID NO: 25389 - protein, 8 aa, Homo sapiens
  Light chain CDR3 for antibody 12695 (IGKV3-11)
QQRSNWLT

SEQ ID NO: 25390 - protein, 14 aa, Homo sapiens
  Heavy chain CDR3 for antibody 12695 (IGHV4-39)
ARQGTMIRGGYFDY

SEQ ID NO: 25391 - protein, 8 aa, Homo sapiens
  Light chain CDR3 for antibody 12696 (IGKV1D-13)
QQYNSYYT

SEQ ID NO: 25392 - protein, 20 aa, Homo sapiens
  Heavy chain CDR3 for antibody 12696 (IGHV1-f)
ATHYDILTGSPYYYYCALDV

SEQ ID NO: 25393 - protein, 9 aa, Homo sapiens
  Light chain CDR3 for antibody 12697 (IGKV1-6)
LQDFHYPWT

SEQ ID NO: 25394 - protein, 14 aa, Homo sapiens
  Heavy chain CDR3 for antibody 12697 (IGHV3-21)
ARGGYSGYRYYFDY

SEQ ID NO: 25395 - protein, 9 aa, Homo sapiens
  Light chain CDR3 for antibody 12698 (IGKV1-6)
QQGNTYSRT

SEQ ID NO: 25396 - protein, 17 aa, Homo sapiens
  Heavy chain CDR3 for antibody 12698 (IGHV4-34)
AGLRFFDWLFDYYGMDV

SEQ ID NO: 25397 - protein, 9 aa, Homo sapiens
  Light chain CDR3 for antibody 12699 (IGKV5-2)
LQHDNFPWT

SEQ ID NO: 25398 - protein, 18 aa, Homo sapiens
  Heavy chain CDR3 for antibody 12699 (IGHV3-33)
ARGYYGSGNFYKDSGRDV

SEQ ID NO: 25399 - protein, 9 aa, Homo sapiens
  Light chain CDR3 for antibody 12700 (IGKV5-2)
LQHDKFPYT

SEQ ID NO: 25400 - protein, 13 aa, Homo sapiens
  Heavy chain CDR3 for antibody 12700 (IGHV4-59)
ARDAGYSSSWLDY

SEQ ID NO: 25401 - protein, 10 aa, Homo sapiens
  Light chain CDR3 for antibody 12701 (IGKV1-39)
QQSYSTPMYT

SEQ ID NO: 25402 - protein, 19 aa, Homo sapiens
  Heavy chain CDR3 for antibody 12701 (IGHV3-33)
TRDPHYDILTGYAYYGMDV

SEQ ID NO: 25403 - protein, 10 aa, Homo sapiens
  Light chain CDR3 for antibody 12702 (IGKV3-15)
QQYNNWPPYT

SEQ ID NO: 25404 - protein, 18 aa, Homo sapiens
  Heavy chain CDR3 for antibody 12702 (IGHV3-33)
ARDRDRYGSGTYPDAIAI

SEQ ID NO: 25405 - protein, 11 aa, Homo sapiens
  Light chain CDR3 for antibody 12703 (IGKV3-11)
QQRSNWPPTWT

SEQ ID NO: 25406 - protein, 17 aa, Homo sapiens
  Heavy chain CDR3 for antibody 12703 (IGHV1-24)
ATEGYDILPGYYNVLDY

SEQ ID NO: 25407 - protein, 9 aa, Homo sapiens
  Light chain CDR3 for antibody 12704 (IGKV1-9)
QQLISYPLT

SEQ ID NO: 25408 - protein, 11 aa, Homo sapiens
  Heavy chain CDR3 for antibody 12704 (IGHV3-33)
ARDGIAAVFDY

SEQ ID NO: 25409 - protein, 8 aa, Homo sapiens
  Light chain CDR3 for antibody 12705 (IGKV2D-28)
MQALQTPT

SEQ ID NO: 25410 - protein, 15 aa, Homo sapiens
  Heavy chain CDR3 for antibody 12705 (IGHV3-20)
ARDRGSSGWRDWFDP

SEQ ID NO: 25411 - protein, 9 aa, Homo sapiens
  Light chain CDR3 for antibody 12706 (IGKV3-11)
QQRSNWMYT

SEQ ID NO: 25412 - protein, 20 aa, Homo sapiens
  Heavy chain CDR3 for antibody 12706 (IGHV3-33)
SRGGATLVRGVIDYYYGMDV

SEQ ID NO: 25413 - protein, 9 aa, Homo sapiens
  Light chain CDR3 for antibody 12707 (IGKV1-5)
QQYNTYSRT

SEQ ID NO: 25414 - protein, 12 aa, Homo sapiens
  Heavy chain CDR3 for antibody 12707 (IGHV3-74)
ARDLVGATPFDY

SEQ ID NO: 25415 - protein, 9 aa, Homo sapiens
  Light chain CDR3 for antibody 12708 (IGKV1-6)
LQDYNYPWT

SEQ ID NO: 25416 - protein, 16 aa, Homo sapiens
  Heavy chain CDR3 for antibody 12708 (IGHV3-33)
ARGDGDILTGFYGMDV

SEQ ID NO: 25417 - protein, 7 aa, Homo sapiens
  Light chain CDR3 for antibody 12709 (IGKV1-17)
LQHNSYP

SEQ ID NO: 25418 - protein, 13 aa, Homo sapiens
  Heavy chain CDR3 for antibody 12709 (IGHV3-33)
ARQWPSGYWYFDL

SEQ ID NO: 25419 - protein, 9 aa, Homo sapiens
  Light chain CDR3 for antibody 12710 (IGKV1-6)
LQDYNSPWT

SEQ ID NO: 25420 - protein, 14 aa, Homo sapiens
  Heavy chain CDR3 for antibody 12710 (IGHV3-33)
ARAVSGSSYWYFDL

SEQ ID NO: 25421 - protein, 9 aa, Homo sapiens
  Light chain CDR3 for antibody 12711 (IGKV1-33)
QQYDNLPFT

SEQ ID NO: 25422 - protein, 14 aa, Homo sapiens
  Heavy chain CDR3 for antibody 12711 (IGHV3-33)
ARDRNYDILNGGGY

SEQ ID NO: 25423 - protein, 10 aa, Homo sapiens
  Light chain CDR3 for antibody 12712 (IGKV1-27)
QKYNSAPMYT

SEQ ID NO: 25424 - protein, 13 aa, Homo sapiens
  Heavy chain CDR3 for antibody 12712 (IGHV1-18)
ARSITMVRGVIGY

SEQ ID NO: 25425 - protein, 9 aa, Homo sapiens
  Light chain CDR3 for antibody 12713 (IGKV1-9)
QQLNGYPFT

SEQ ID NO: 25426 - protein, 11 aa, Homo sapiens
  Heavy chain CDR3 for antibody 12713 (IGHV4-59)
ARDRGHYGMDV

SEQ ID NO: 25427 - protein, 10 aa, Homo sapiens
  Light chain CDR3 for antibody 12714 (IGKV1-17)
LQHNSYPIFT

SEQ ID NO: 25428 - protein, 14 aa, Homo sapiens
  Heavy chain CDR3 for antibody 12714 (IGHV4-39)
ARDSGYDYYYGMDV

SEQ ID NO: 25429 - protein, 9 aa, Homo sapiens
  Light chain CDR3 for antibody 12715 (IGKV3-11)
QQRSDWPLT

SEQ ID NO: 25430 - protein, 16 aa, Homo sapiens
  Heavy chain CDR3 for antibody 12715 (IGHV3-20)
ARDSSSLDYYYYGMDV

SEQ ID NO: 25431 - protein, 9 aa, Homo sapiens
  Light chain CDR3 for antibody 12716 (IGKV1-9)
QQLKSYLYT

SEQ ID NO: 25432 - protein, 12 aa, Homo sapiens
  Heavy chain CDR3 for antibody 12716 (IGHV3-33)
AREGDILTGYSL

SEQ ID NO: 25433 - protein, 9 aa, Homo sapiens
  Light chain CDR3 for antibody 12717 (IGKV1-16)
LQDYNYPWT

SEQ ID NO: 25434 - protein, 16 aa, Homo sapiens
  Heavy chain CDR3 for antibody 12717 (IGHV3-23)
AKDVGLAAAGSGWFDP

SEQ ID NO: 25435 - protein, 11 aa, Homo sapiens
  Light chain CDR3 for antibody 12718 (IGKV3-11)
QQRSNWPPTWT

SEQ ID NO: 25436 - protein, 18 aa, Homo sapiens
  Heavy chain CDR3 for antibody 12718 (IGHV3-33)
ARERGYYGSDIYPAAFDI

SEQ ID NO: 25437 - protein, 9 aa, Homo sapiens
  Light chain CDR3 for antibody 12719 (IGKV1D-16)
QQYDSYPYT

SEQ ID NO: 25438 - protein, 11 aa, Homo sapiens
  Heavy chain CDR3 for antibody 12719 (IGHV3-33)
ARDGIAAVFDY

SEQ ID NO: 25439 - protein, 9 aa, Homo sapiens
  Light chain CDR3 for antibody 12720 (IGKV3-11)
QQRSNWMYT

SEQ ID NO: 25440 - protein, 11 aa, Homo sapiens
  Heavy chain CDR3 for antibody 12720 (IGHV4-39)
ARLLVGATTDY

SEQ ID NO: 25441 - protein, 9 aa, Homo sapiens
  Light chain CDR3 for antibody 12721 (IGKV5-2)
LQHDKFPYT

SEQ ID NO: 25442 - protein, 12 aa, Homo sapiens
  Heavy chain CDR3 for antibody 12721 (IGHV3-33)
ARDGRAAAYFDN

SEQ ID NO: 25443 - protein, 7 aa, Homo sapiens
  Light chain CDR3 for antibody 12722 (IGKV1-17)
LQHNSYP

SEQ ID NO: 25444 - protein, 16 aa, Homo sapiens
  Heavy chain CDR3 for antibody 12722 (IGHV3-23)
AKEGMVLRYFDWLWDY

SEQ ID NO: 25445 - protein, 10 aa, Homo sapiens
  Light chain CDR3 for antibody 12723 (IGKV1-17)
LQHNSYPMYT

SEQ ID NO: 25446 - protein, 18 aa, Homo sapiens
  Heavy chain CDR3 for antibody 12723 (IGHV3-33)
ARDRYYDILTGYYMGFDY

SEQ ID NO: 25447 - protein, 9 aa, Homo sapiens
  Light chain CDR3 for antibody 12724 (IGKV3-15)
QQYINWPLT

SEQ ID NO: 25448 - protein, 20 aa, Homo sapiens
  Heavy chain CDR3 for antibody 12724 (IGHV3-33)
AREDYYGSGSYYPAYNWFDP

SEQ ID NO: 25449 - protein, 9 aa, Homo sapiens
  Light chain CDR3 for antibody 12725 (IGKV3-11)
QQRSNWMYT

SEQ ID NO: 25450 - protein, 12 aa, Homo sapiens
  Heavy chain CDR3 for antibody 12725 (IGHV4-39)
ARHGSGSSYFDY

SEQ ID NO: 25451 - protein, 9 aa, Homo sapiens
  Light chain CDR3 for antibody 12726 (IGKV1D-16)
QQYNSYPYT

SEQ ID NO: 25452 - protein, 17 aa, Homo sapiens
  Heavy chain CDR3 for antibody 12726 (IGHV1-18)
ARDRYYGSGNYKYHMDV

SEQ ID NO: 25453 - protein, 9 aa, Homo sapiens
  Light chain CDR3 for antibody 12727 (IGKV3D-7)
QQDYDLPYP

SEQ ID NO: 25454 - protein, 14 aa, Homo sapiens
  Heavy chain CDR3 for antibody 12727 (IGHV4-39)
ARQDYDILTGLFDY

SEQ ID NO: 25455 - protein, 9 aa, Homo sapiens
  Light chain CDR3 for antibody 12728 (IGKV1-27)
QKYNSAPYT

SEQ ID NO: 25456 - protein, 17 aa, Homo sapiens
  Heavy chain CDR3 for antibody 12728 (IGHV3-33)
ARGGGYEDDHYYYGMDV

SEQ ID NO: 25457 - protein, 9 aa, Homo sapiens
  Light chain CDR3 for antibody 12729 (IGKV1-27)
QKYNSAPWT

SEQ ID NO: 25458 - protein, 13 aa, Homo sapiens
  Heavy chain CDR3 for antibody 12729 (IGHV1-18)
ARSYYGSGSPFDY

SEQ ID NO: 25459 - protein, 10 aa, Homo sapiens
  Light chain CDR3 for antibody 12730 (IGKV3-11)
QQRSNWPILT

SEQ ID NO: 25460 - protein, 16 aa, Homo sapiens
  Heavy chain CDR3 for antibody 12730 (IGHV4-59)
ARFYFGSGSYYWYFDL

SEQ ID NO: 25461 - protein, 10 aa, Homo sapiens
  Light chain CDR3 for antibody 12731 (IGKV1-39)
QKYNSAPMYT

SEQ ID NO: 25462 - protein, 21 aa, Homo sapiens
  Heavy chain CDR3 for antibody 12731 (IGHV3-33)
ARKRLYDILTGYYKAYYGMDV

SEQ ID NO: 25463 - protein, 9 aa, Homo sapiens
  Light chain CDR3 for antibody 12732 (IGKV3-11)
QQRINWPWT

SEQ ID NO: 25464 - protein, 13 aa, Homo sapiens
  Heavy chain CDR3 for antibody 12732 (IGHV3-33)
ARDWGYSHGYFDY

SEQ ID NO: 25465 - protein, 9 aa, Homo sapiens
  Light chain CDR3 for antibody 12733 (IGKV3-15)
QQYNNWPRT

SEQ ID NO: 25466 - protein, 17 aa, Homo sapiens
  Heavy chain CDR3 for antibody 12733 (IGHV3-33)
AREGTMVRGYYYYGMDV

SEQ ID NO: 25467 - protein, 9 aa, Homo sapiens
  Light chain CDR3 for antibody 12734 (IGKV1D-16)
QQYITYPYT

SEQ ID NO: 25468 - protein, 14 aa, Homo sapiens
  Heavy chain CDR3 for antibody 12734 (IGHV3-33)
ARKGYSGRYYYFDY

SEQ ID NO: 25469 - protein, 9 aa, Homo sapiens
  Light chain CDR3 for antibody 12735 (IGKV1-6)
LQQNSYPWT

SEQ ID NO: 25470 - protein, 12 aa, Homo sapiens
  Heavy chain CDR3 for antibody 12735 (IGHV4-59)
ARDSGSYYFFDY

SEQ ID NO: 25471 - protein, 9 aa, Homo sapiens
  Light chain CDR3 for antibody 12736 (IGKV1-27)
QKYNSAPYT

SEQ ID NO: 25472 - protein, 18 aa, Homo sapiens
  Heavy chain CDR3 for antibody 12736 (IGHV3-33)
ARGYYGSGNFYKHSGMDV

SEQ ID NO: 25473 - protein, 10 aa, Homo sapiens
  Light chain CDR3 for antibody 12737 (IGKV3-11)
QQRSNWPALT

SEQ ID NO: 25474 - protein, 11 aa, Homo sapiens
  Heavy chain CDR3 for antibody 12737 (IGHV3-33)
ARDQGGSSFDY

SEQ ID NO: 25475 - protein, 9 aa, Homo sapiens
  Light chain CDR3 for antibody 12738 (IGKV3-15)
QQYNNWPYT

SEQ ID NO: 25476 - protein, 20 aa, Homo sapiens
  Heavy chain CDR3 for antibody 12738 (IGHV3-33)
ARDPAQLERRYYYFYYGMDV

SEQ ID NO: 25477 - protein, 9 aa, Homo sapiens
  Light chain CDR3 for antibody 12739 (IGKV5-2)
LQHDKFPYT

SEQ ID NO: 25478 - protein, 11 aa, Homo sapiens
  Heavy chain CDR3 for antibody 12739 (IGHV1-24)
ATREYSSSCDY

SEQ ID NO: 25479 - protein, 9 aa, Homo sapiens
  Light chain CDR3 for antibody 12740 (IGKV1-39)
QQGFSTPWT

SEQ ID NO: 25480 - protein, 10 aa, Homo sapiens
  Heavy chain CDR3 for antibody 12740 (IGHV4-59)
AKGDRWRFDP

SEQ ID NO: 25481 - protein, 9 aa, Homo sapiens
  Light chain CDR3 for antibody 12741 (IGKV1-17)
LQHTSYPFT

SEQ ID NO: 25482 - protein, 17 aa, Homo sapiens
  Heavy chain CDR3 for antibody 12741 (IGHV1-18)
ARERYYGSGSYKYNMDV

SEQ ID NO: 25483 - protein, 9 aa, Homo sapiens
  Light chain CDR3 for antibody 12742 (IGKV1-5)
QQYNTYSRT

SEQ ID NO: 25484 - protein, 20 aa, Homo sapiens
  Heavy chain CDR3 for antibody 12742 (IGHV3-33)
SRGGATLVRGVIDYYYGMDV

SEQ ID NO: 25485 - protein, 9 aa, Homo sapiens
  Light chain CDR3 for antibody 12743 (IGKV2-30)
MQGTHWPLT

SEQ ID NO: 25486 - protein, 17 aa, Homo sapiens
  Heavy chain CDR3 for antibody 12743 (IGHV3-33)
ARENDILTGSYYYGMDV

SEQ ID NO: 25487 - protein, 9 aa, Homo sapiens
  Light chain CDR3 for antibody 12744 (IGKV1-9)
QQLKSYLYT

SEQ ID NO: 25488 - protein, 12 aa, Homo sapiens
  Heavy chain CDR3 for antibody 12744 (IGHV3-23)
AKDGWFGESLDY

SEQ ID NO: 25489 - protein, 10 aa, Homo sapiens
  Light chain CDR3 for antibody 12745 (IGKV1-27)
QKYNSAPMYT

SEQ ID NO: 25490 - protein, 14 aa, Homo sapiens
  Heavy chain CDR3 for antibody 12745 (IGHV3-66)
ARDNILTAYYLFDY

SEQ ID NO: 25491 - protein, 9 aa, Homo sapiens
  Light chain CDR3 for antibody 12746 (IGKV1-9)
QQLTSFPRT

SEQ ID NO: 25492 - protein, 15 aa, Homo sapiens
  Heavy chain CDR3 for antibody 12746 (IGHV3-33)
ARDRGWKAPGYGMDV

SEQ ID NO: 25493 - protein, 10 aa, Homo sapiens
  Light chain CDR3 for antibody 12747 (IGKV1-17)
LQHNSYPMYT

SEQ ID NO: 25494 - protein, 17 aa, Homo sapiens
  Heavy chain CDR3 for antibody 12747 (IGHV4-59)
ARDFLVRGEGSYYGMDV

SEQ ID NO: 25495 - protein, 10 aa, Homo sapiens
  Light chain CDR3 for antibody 12748 (IGKV1-27)
QKYNSAPMYT

SEQ ID NO: 25496 - protein, 18 aa, Homo sapiens
  Heavy chain CDR3 for antibody 12748 (IGHV6-1)
ARDQYSYGPYYYYYGMDV

SEQ ID NO: 25497 - protein, 8 aa, Homo sapiens
  Light chain CDR3 for antibody 12749 (IGKV3D-7)
QQDYNLLT

SEQ ID NO: 25498 - protein, 16 aa, Homo sapiens
  Heavy chain CDR3 for antibody 12749 (IGHV3-33)
ARAYYYGSGSYPHFQH

SEQ ID NO: 25499 - protein, 9 aa, Homo sapiens
  Light chain CDR3 for antibody 12750 (IGKV3D-20)
QQYGRSPYT

SEQ ID NO: 25500 - protein, 19 aa, Homo sapiens
  Heavy chain CDR3 for antibody 12750 (IGHV3-33)
ARGGVVRGVIEYYYYGMDV

SEQ ID NO: 25501 - protein, 9 aa, Homo sapiens
  Light chain CDR3 for antibody 12751 (IGKV1-17)
LHSNNYPWT

SEQ ID NO: 25502 - protein, 12 aa, Homo sapiens
  Heavy chain CDR3 for antibody 12751 (IGHV3-33)
ARDSSGWSHFDY

SEQ ID NO: 25503 - protein, 9 aa, Homo sapiens
  Light chain CDR3 for antibody 12752 (IGKV1-16)
QQYNSYPLT

SEQ ID NO: 25504 - protein, 4 aa, Homo sapiens
  Heavy chain CDR3 for antibody 12752 (IGHV3-30)
ARDN

SEQ ID NO: 25505 - protein, 9 aa, Homo sapiens
  Light chain CDR3 for antibody 12753 (IGKV1-6)
LQHNSYPYT

SEQ ID NO: 25506 - protein, 15 aa, Homo sapiens
  Heavy chain CDR3 for antibody 12753 (IGHV1-18)
ARGSYDSSGYYYFDY

SEQ ID NO: 25507 - protein, 9 aa, Homo sapiens
  Light chain CDR3 for antibody 12754 (IGKV1-5)
LQYDSYPWT

SEQ ID NO: 25508 - protein, 13 aa, Homo sapiens
  Heavy chain CDR3 for antibody 12754 (IGHV4-39)
ARHEVMIRGVFDY

SEQ ID NO: 25509 - protein, 9 aa, Homo sapiens
  Light chain CDR3 for antibody 12755 (IGKV3-11)
QHRGNWPLT

SEQ ID NO: 25510 - protein, 16 aa, Homo sapiens
  Heavy chain CDR3 for antibody 12755 (IGHV3-23)
AKEGMVLRYFDWLWDY

SEQ ID NO: 25511 - protein, 10 aa, Homo sapiens
  Light chain CDR3 for antibody 12756 (IGKV3-15)
QQYNKWPPYT

SEQ ID NO: 25512 - protein, 20 aa, Homo sapiens
  Heavy chain CDR3 for antibody 12756 (IGHV1-f)
ATGLITFVRGVILTYRSFDY

SEQ ID NO: 25513 - protein, 9 aa, Homo sapiens
  Light chain CDR3 for antibody 12757 (IGKV1-33)
QQYDNLPFT

SEQ ID NO: 25514 - protein, 15 aa, Homo sapiens
  Heavy chain CDR3 for antibody 12757 (IGHV3-33)
ARRGYNDYDPYGMDV

SEQ ID NO: 25515 - protein, 10 aa, Homo sapiens
  Light chain CDR3 for antibody 12758 (IGKV3-20)
QQYGSSPPYT

SEQ ID NO: 25516 - protein, 12 aa, Homo sapiens
  Heavy chain CDR3 for antibody 12758 (IGHV3-33)
ARDRAYRGSLDY

SEQ ID NO: 25517 - protein, 10 aa, Homo sapiens
  Light chain CDR3 for antibody 12759 (IGKV1-9)
QQLNSFLMYT

SEQ ID NO: 25518 - protein, 13 aa, Homo sapiens
  Heavy chain CDR3 for antibody 12759 (IGHV4-28)
ARKGATGYYGMDV

SEQ ID NO: 25519 - protein, 11 aa, Homo sapiens
  Light chain CDR3 for antibody 12760 (IGKV3-11)
QQRSNWPPTWT

SEQ ID NO: 25520 - protein, 16 aa, Homo sapiens
  Heavy chain CDR3 for antibody 12760 (IGHV1-46)
ARGGGYSESYSNWFDP

SEQ ID NO: 25521 - protein, 9 aa, Homo sapiens
  Light chain CDR3 for antibody 12761 (IGKV6-21)
HQSYSLPHT

SEQ ID NO: 25522 - protein, 20 aa, Homo sapiens
  Heavy chain CDR3 for antibody 12761 (IGHV3-33)
ARDICSSTSCYGYYYYGMDV

SEQ ID NO: 25523 - protein, 9 aa, Homo sapiens
  Light chain CDR3 for antibody 12762 (IGKV1-17)
LHSNNYPWT

SEQ ID NO: 25524 - protein, 15 aa, Homo sapiens
  Heavy chain CDR3 for antibody 12762 (IGHV3-33)
ARDHLTGYYYYGMDV

SEQ ID NO: 25525 - protein, 9 aa, Homo sapiens
  Light chain CDR3 for antibody 12763 (IGKV5-2)
LQHDKFPYT

SEQ ID NO: 25526 - protein, 18 aa, Homo sapiens
  Heavy chain CDR3 for antibody 12763 (IGHV3-33)
VRERGHYGSGSFPDAFDI

SEQ ID NO: 25527 - protein, 9 aa, Homo sapiens
  Light chain CDR3 for antibody 12764 (IGKV1-27)
QKYNSAPYT

SEQ ID NO: 25528 - protein, 14 aa, Homo sapiens
  Heavy chain CDR3 for antibody 12764 (IGHV3-64)
ARGGGAVTGTNFDY

SEQ ID NO: 25529 - protein, 9 aa, Homo sapiens
  Light chain CDR3 for antibody 12765 (IGKV1-17)
LQHNSYPWT

SEQ ID NO: 25530 - protein, 9 aa, Homo sapiens
  Heavy chain CDR3 for antibody 12765 (IGHV3-23)
AIGRYYFDY

SEQ ID NO: 25531 - protein, 9 aa, Homo sapiens
  Light chain CDR3 for antibody 12766 (IGKV1D-16)
QQYNSYPPT

SEQ ID NO: 25532 - protein, 12 aa, Homo sapiens
  Heavy chain CDR3 for antibody 12766 (IGHV3-11)
VRVLLWFGESDY

SEQ ID NO: 25533 - protein, 8 aa, Homo sapiens
  Light chain CDR3 for antibody 12767 (IGKV6-21)
HQSSSLPT

SEQ ID NO: 25534 - protein, 18 aa, Homo sapiens
  Heavy chain CDR3 for antibody 12767 (IGHV3-33)
ARGYYGSGNFYKDSGMDV

SEQ ID NO: 25535 - protein, 9 aa, Homo sapiens
  Light chain CDR3 for antibody 12768 (IGKV1-6)
LQDFHYPWT

SEQ ID NO: 25536 - protein, 13 aa, Homo sapiens
  Heavy chain CDR3 for antibody 12768 (IGHV3-23)
ARAFFMVRGVIDF

SEQ ID NO: 25537 - protein, 10 aa, Homo sapiens
  Light chain CDR3 for antibody 12769 (IGKV1-17)
QKYNSAPMYT

SEQ ID NO: 25538 - protein, 14 aa, Homo sapiens
  Heavy chain CDR3 for antibody 12769 (IGHV3-33)
ARDGYDFLTGPFDY

SEQ ID NO: 25539 - protein, 10 aa, Homo sapiens
  Light chain CDR3 for antibody 12770 (IGKV3-11)
QQRSNWPIFT

SEQ ID NO: 25540 - protein, 9 aa, Homo sapiens
  Heavy chain CDR3 for antibody 12770 (IGHV3-33)
AREYKEFDY

SEQ ID NO: 25541 - protein, 9 aa, Homo sapiens
  Light chain CDR3 for antibody 12771 (IGKV2-30)
MQGTHWPYT

SEQ ID NO: 25542 - protein, 13 aa, Homo sapiens
  Heavy chain CDR3 for antibody 12771 (IGHV4-39)
ARRDVLAPAAFDY

SEQ ID NO: 25543 - protein, 9 aa, Homo sapiens
  Light chain CDR3 for antibody 12772 (IGKV3-15)
QQYNNWPRT

SEQ ID NO: 25544 - protein, 16 aa, Homo sapiens
  Heavy chain CDR3 for antibody 12772 (IGHV4-59)
ARFYFGSGSYYWYFDL

SEQ ID NO: 25545 - protein, 9 aa, Homo sapiens
  Light chain CDR3 for antibody 12773 (IGKV2-30)
AQGSYWPAS

SEQ ID NO: 25546 - protein, 13 aa, Homo sapiens
  Heavy chain CDR3 for antibody 12773 (IGHV3-33)
AKEDGDYHHYFDY

SEQ ID NO: 25547 - protein, 9 aa, Homo sapiens
  Light chain CDR3 for antibody 12774 (IGKV1-33)
QQYDNLPFT

SEQ ID NO: 25548 - protein, 9 aa, Homo sapiens
  Heavy chain CDR3 for antibody 12774 (IGHV3-30)
ARDYFHYDY

SEQ ID NO: 25549 - protein, 10 aa, Homo sapiens
  Light chain CDR3 for antibody 12775 (IGKV1-17)
LQHNSYPMYT

SEQ ID NO: 25550 - protein, 12 aa, Homo sapiens
  Heavy chain CDR3 for antibody 12775 (IGHV3-23)
ARQGYDMHEFDI

SEQ ID NO: 25551 - protein, 9 aa, Homo sapiens
  Light chain CDR3 for antibody 12776 (IGKV1-6)
LQDFHYPWT

SEQ ID NO: 25552 - protein, 11 aa, Homo sapiens
  Heavy chain CDR3 for antibody 12776 (IGHV3-74)
ARDRGNWGFDY

SEQ ID NO: 25553 - protein, 9 aa, Homo sapiens
  Light chain CDR3 for antibody 12777 (IGKV3-15)
QQYNNWPRT

SEQ ID NO: 25554 - protein, 12 aa, Homo sapiens
  Heavy chain CDR3 for antibody 12777 (IGHV3-33)
AREGIAVAGVDP

SEQ ID NO: 25555 - protein, 9 aa, Homo sapiens
  Light chain CDR3 for antibody 12778 (IGKV2D-24)
TQATQFPHT

SEQ ID NO: 25556 - protein, 16 aa, Homo sapiens
  Heavy chain CDR3 for antibody 12778 (IGHV1-24)
ATEDSSSYYYYYGMDV

SEQ ID NO: 25557 - protein, 9 aa, Homo sapiens
  Light chain CDR3 for antibody 12779 (IGKV1-16)
QQYNSYPYT

SEQ ID NO: 25558 - protein, 16 aa, Homo sapiens
  Heavy chain CDR3 for antibody 12779 (IGHV3-33)
ARDGSMVRRIHDAFDF

SEQ ID NO: 25559 - protein, 9 aa, Homo sapiens
  Light chain CDR3 for antibody 12780 (IGKV3D-20)
QQYGSSPRT

SEQ ID NO: 25560 - protein, 17 aa, Homo sapiens
  Heavy chain CDR3 for antibody 12780 (IGHV3-23)
AKDRDWKDGYYYFGMDV

SEQ ID NO: 25561 - protein, 10 aa, Homo sapiens
  Light chain CDR3 for antibody 12781 (IGKV1-6)
LQDYNYPMYT

SEQ ID NO: 25562 - protein, 12 aa, Homo sapiens
  Heavy chain CDR3 for antibody 12781 (IGHV1-46)
ARGLTGDHAVDI

SEQ ID NO: 25563 - protein, 9 aa, Homo sapiens
  Light chain CDR3 for antibody 12782 (IGKV1-39)
QQSYRTPLT

SEQ ID NO: 25564 - protein, 16 aa, Homo sapiens
  Heavy chain CDR3 for antibody 12782 (IGHV4-59)
AREGYNWNDGVNWFDP

SEQ ID NO: 25565 - protein, 9 aa, Homo sapiens
  Light chain CDR3 for antibody 12783 (IGKV1-9)
QQGNTYSRT

SEQ ID NO: 25566 - protein, 15 aa, Homo sapiens
  Heavy chain CDR3 for antibody 12783 (IGHV3-30)
ARDSRPEIIGPPFDY

SEQ ID NO: 25567 - protein, 9 aa, Homo sapiens
  Light chain CDR3 for antibody 12784 (IGKV1-33)
QQYDNLPFT

SEQ ID NO: 25568 - protein, 11 aa, Homo sapiens
  Heavy chain CDR3 for antibody 12784 (IGHV3-33)
ARAGIAAVFDY

SEQ ID NO: 25569 - protein, 9 aa, Homo sapiens
  Light chain CDR3 for antibody 12785 (IGKV5-2)
LQHDNSPYT

SEQ ID NO: 25570 - protein, 10 aa, Homo sapiens
  Heavy chain CDR3 for antibody 12785 (IGHV3-33)
ARDHGWCFDY

SEQ ID NO: 25571 - protein, 8 aa, Homo sapiens
  Light chain CDR3 for antibody 12786 (IGKV3-20)
QQYGSSLT

SEQ ID NO: 25572 - protein, 20 aa, Homo sapiens
  Heavy chain CDR3 for antibody 12786 (IGHV3-33)
AKGMGGLRYFDWPHYYGMDV

SEQ ID NO: 25573 - protein, 9 aa, Homo sapiens
  Light chain CDR3 for antibody 12787 (IGKV1-6)
LQDYKSPFT

SEQ ID NO: 25574 - protein, 10 aa, Homo sapiens
  Heavy chain CDR3 for antibody 12787 (IGHV3-23)
AKENWNDFDY

SEQ ID NO: 25575 - protein, 10 aa, Homo sapiens
  Light chain CDR3 for antibody 12788 (IGKV1-9)
QQLDSYPMYT

SEQ ID NO: 25576 - protein, 18 aa, Homo sapiens
  Heavy chain CDR3 for antibody 12788 (IGHV4-39)
ARQYYFGSGNYYRGWFDP

SEQ ID NO: 25577 - protein, 9 aa, Homo sapiens
  Light chain CDR3 for antibody 12789 (IGKV1-33)
QQYDNLPFT

SEQ ID NO: 25578 - protein, 8 aa, Homo sapiens
  Heavy chain CDR3 for antibody 12789 (IGHV3-23)
EKSAGEDV

SEQ ID NO: 25579 - protein, 9 aa, Homo sapiens
  Light chain CDR3 for antibody 12790 (IGKV1-39)
QQSYSTPYT

SEQ ID NO: 25580 - protein, 15 aa, Homo sapiens
  Heavy chain CDR3 for antibody 12790 (IGHV4-39)
ARHSKYSSGWYPFDY

SEQ ID NO: 25581 - protein, 9 aa, Homo sapiens
  Light chain CDR3 for antibody 12791 (IGKV1-9)
QQLHIYPWT

SEQ ID NO: 25582 - protein, 16 aa, Homo sapiens
  Heavy chain CDR3 for antibody 12791 (IGHV4-59)
ARGRYFEWLLGDVFDI

SEQ ID NO: 25583 - protein, 8 aa, Homo sapiens
  Light chain CDR3 for antibody 12792 (IGKV3-11)
LQRGNWPT

SEQ ID NO: 25584 - protein, 18 aa, Homo sapiens
  Heavy chain CDR3 for antibody 12792 (IGHV4-59)
AREGHYYTSGSYYKAFDY

SEQ ID NO: 25585 - protein, 9 aa, Homo sapiens
  Light chain CDR3 for antibody 12793 (IGKV1-27)
QKYNSAPYT

SEQ ID NO: 25586 - protein, 15 aa, Homo sapiens
  Heavy chain CDR3 for antibody 12793 (IGHV3-33)
ARRGYNDYDPYGMDV

SEQ ID NO: 25587 - protein, 9 aa, Homo sapiens
  Light chain CDR3 for antibody 12794 (IGKV1-9)
QQLNSYPYT

SEQ ID NO: 25588 - protein, 9 aa, Homo sapiens
  Heavy chain CDR3 for antibody 12794 (IGHV3-33)
ASHSSGEDY

SEQ ID NO: 25589 - protein, 9 aa, Homo sapiens
  Light chain CDR3 for antibody 12795 (IGKV2D-24)
TQATQFPHT

SEQ ID NO: 25590 - protein, 15 aa, Homo sapiens
  Heavy chain CDR3 for antibody 12795 (IGHV1-2)
ARDLGYYGSGSRMDV

SEQ ID NO: 25591 - protein, 9 aa, Homo sapiens
  Light chain CDR3 for antibody 12796 (IGKV1-9)
QQLKSYPYT

SEQ ID NO: 25592 - protein, 14 aa, Homo sapiens
  Heavy chain CDR3 for antibody 12796 (IGHV3-20)
ARDEGSGGYDVFDI

SEQ ID NO: 25593 - protein, 9 aa, Homo sapiens
  Light chain CDR3 for antibody 12797 (IGKV1-6)
LQDYNYPWT

SEQ ID NO: 25594 - protein, 13 aa, Homo sapiens
  Heavy chain CDR3 for antibody 12797 (IGHV3-33)
ARDQRYSSGWCDY

SEQ ID NO: 25595 - protein, 9 aa, Homo sapiens
  Light chain CDR3 for antibody 12798 (IGKV1-17)
LHSNNYPWT

SEQ ID NO: 25596 - protein, 15 aa, Homo sapiens
  Heavy chain CDR3 for antibody 12798 (IGHV3-23)
AKDGSYYDYYYGMDV

SEQ ID NO: 25597 - protein, 8 aa, Homo sapiens
  Light chain CDR3 for antibody 12799 (IGKV3D-7)
QQDYHLLT

SEQ ID NO: 25598 - protein, 17 aa, Homo sapiens
  Heavy chain CDR3 for antibody 12799 (IGHV4-34)
ARDGSGSYTHYYYCMDV

SEQ ID NO: 25599 - protein, 8 aa, Homo sapiens
  Light chain CDR3 for antibody 12800 (IGKV3-11)
LQRGNWPT

SEQ ID NO: 25600 - protein, 17 aa, Homo sapiens
  Heavy chain CDR3 for antibody 12800 (IGHV3-23)
AKDGIGELSYYYYGMDV

SEQ ID NO: 25601 - protein, 10 aa, Homo sapiens
  Light chain CDR3 for antibody 12801 (IGKV3-11)
QQRSNWPIWT

SEQ ID NO: 25602 - protein, 9 aa, Homo sapiens
  Heavy chain CDR3 for antibody 12801 (IGHV3-23)
ARGRLDFDY

SEQ ID NO: 25603 - protein, 9 aa, Homo sapiens
  Light chain CDR3 for antibody 12802 (IGKV4-1)
QQYYSYPLT

SEQ ID NO: 25604 - protein, 11 aa, Homo sapiens
  Heavy chain CDR3 for antibody 12802 (IGHV1-46)
AREQHGQAPDY

SEQ ID NO: 25605 - protein, 10 aa, Homo sapiens
  Light chain CDR3 for antibody 12803 (IGKV1-39)
QQSYSTPMYT

SEQ ID NO: 25606 - protein, 17 aa, Homo sapiens
  Heavy chain CDR3 for antibody 12803 (IGHV4-34)
AGLRFFDWLFDYYGMDV

SEQ ID NO: 25607 - protein, 9 aa, Homo sapiens
  Light chain CDR3 for antibody 12804 (IGKV1-17)
LQHYSYPRT

SEQ ID NO: 25608 - protein, 15 aa, Homo sapiens
  Heavy chain CDR3 for antibody 12804 (IGHV3-33)
ARDSRPEIIGPPFDY

SEQ ID NO: 25609 - protein, 9 aa, Homo sapiens
  Light chain CDR3 for antibody 12805 (IGKV1D-13)
QQFNNYPHT

SEQ ID NO: 25610 - protein, 12 aa, Homo sapiens
  Heavy chain CDR3 for antibody 12805 (IGHV1-18)
ARRDGSGTSFDY

SEQ ID NO: 25611 - protein, 10 aa, Homo sapiens
  Light chain CDR3 for antibody 12806 (IGKV3-20)
QQYGRSPPVT

SEQ ID NO: 25612 - protein, 10 aa, Homo sapiens
  Heavy chain CDR3 for antibody 12806 (IGHV3-33)
ARDVVVYFDY

SEQ ID NO: 25613 - protein, 8 aa, Homo sapiens
  Light chain CDR3 for antibody 12807 (IGKV3-20)
QQYGSSRT

SEQ ID NO: 25614 - protein, 12 aa, Homo sapiens
  Heavy chain CDR3 for antibody 12807 (IGHV1-18)
ARVLFYGDYFDY

SEQ ID NO: 25615 - protein, 10 aa, Homo sapiens
  Light chain CDR3 for antibody 12808 (IGKV1-39)
QQSYSTPMYT

SEQ ID NO: 25616 - protein, 8 aa, Homo sapiens
  Heavy chain CDR3 for antibody 12808 (IGHV3-23)
EKSAGEDV

SEQ ID NO: 25617 - protein, 9 aa, Homo sapiens
  Light chain CDR3 for antibody 12809 (IGKV1-9)
QQLHIYPWT

SEQ ID NO: 25618 - protein, 11 aa, Homo sapiens
  Heavy chain CDR3 for antibody 12809 (IGHV3-33)
AREAANWGFDY

SEQ ID NO: 25619 - protein, 9 aa, Homo sapiens
  Light chain CDR3 for antibody 12810 (IGKV1-9)
QQLISYPLT

SEQ ID NO: 25620 - protein, 16 aa, Homo sapiens
  Heavy chain CDR3 for antibody 12810 (IGHV3-33)
AREVGAKDYYYYGMDV

SEQ ID NO: 25621 - protein, 8 aa, Homo sapiens
  Light chain CDR3 for antibody 12811 (IGKV1-39)
QQSYSTLT

SEQ ID NO: 25622 - protein, 17 aa, Homo sapiens
  Heavy chain CDR3 for antibody 12811 (IGHV3-33)
ARDRDDYGDYYYYGMDV

SEQ ID NO: 25623 - protein, 10 aa, Homo sapiens
  Light chain CDR3 for antibody 12812 (IGKV1-27)
QKYNSAPMYT

SEQ ID NO: 25624 - protein, 17 aa, Homo sapiens
  Heavy chain CDR3 for antibody 12812 (IGHV4-34)
AGLRFFDWLFDYYGMDV

SEQ ID NO: 25625 - protein, 9 aa, Homo sapiens
  Light chain CDR3 for antibody 12813 (IGKV6-21)
HQSTSLPHT

SEQ ID NO: 25626 - protein, 15 aa, Homo sapiens
  Heavy chain CDR3 for antibody 12813 (IGHV4-39)
ARRSKYSSAWYPFDY

SEQ ID NO: 25627 - protein, 9 aa, Homo sapiens
  Light chain CDR3 for antibody 12814 (IGKV1-9)
QQYNSYPYT

SEQ ID NO: 25628 - protein, 18 aa, Homo sapiens
  Heavy chain CDR3 for antibody 12814 (IGHV1-8)
ARGRYNSGWNYYYFGMDV

SEQ ID NO: 25629 - protein, 9 aa, Homo sapiens
  Light chain CDR3 for antibody 12815 (IGKV1-6)
LQDYNHPFT

SEQ ID NO: 25630 - protein, 11 aa, Homo sapiens
  Heavy chain CDR3 for antibody 12815 (IGHV3-33)
ARGTTVTHFEY

SEQ ID NO: 25631 - protein, 9 aa, Homo sapiens
  Light chain CDR3 for antibody 12816 (IGKV1-6)
LQDFHYPWT

SEQ ID NO: 25632 - protein, 21 aa, Homo sapiens
  Heavy chain CDR3 for antibody 12816 (IGHV3-33)
ARDEYYEIVTGYGYYHYGMDV

SEQ ID NO: 25633 - protein, 9 aa, Homo sapiens
  Light chain CDR3 for antibody 12817 (IGKV3D-7)
QQDYEFPLT

SEQ ID NO: 25634 - protein, 19 aa, Homo sapiens
  Heavy chain CDR3 for antibody 12817 (IGHV3-33)
ARGVRLRYFDPYYYYGMDV

SEQ ID NO: 25635 - protein, 9 aa, Homo sapiens
  Light chain CDR3 for antibody 12818 (IGKV1-17)
LQHNSYPWT

SEQ ID NO: 25636 - protein, 14 aa, Homo sapiens
  Heavy chain CDR3 for antibody 12818 (IGHV3-33)
ARDHYDSGSYFLDY

SEQ ID NO: 25637 - protein, 9 aa, Homo sapiens
  Light chain CDR3 for antibody 12819 (IGKV1-17)
LQHNSYPLT

SEQ ID NO: 25638 - protein, 18 aa, Homo sapiens
  Heavy chain CDR3 for antibody 12819 (IGHV3-33)
ARREGIVGTTTYYYGMDV

SEQ ID NO: 25639 - protein, 9 aa, Homo sapiens
  Light chain CDR3 for antibody 12820 (IGKV1-6)
LQVYSYPWT

SEQ ID NO: 25640 - protein, 13 aa, Homo sapiens
  Heavy chain CDR3 for antibody 12820 (IGHV3-33)
ARDWGYSHGYFDY

SEQ ID NO: 25641 - protein, 10 aa, Homo sapiens
  Light chain CDR3 for antibody 12821 (IGKV3-11)
QQRSNWPALT

SEQ ID NO: 25642 - protein, 15 aa, Homo sapiens
  Heavy chain CDR3 for antibody 12821 (IGHV3-33)
AREGLRYFHYYGMDV

SEQ ID NO: 25643 - protein, 9 aa, Homo sapiens
  Light chain CDR3 for antibody 12822 (IGKV3D-7)
QQDYNLPYT

SEQ ID NO: 25644 - protein, 17 aa, Homo sapiens
  Heavy chain CDR3 for antibody 12822 (IGHV1-18)
ARERYYGSGSYKYNMDV

SEQ ID NO: 25645 - protein, 10 aa, Homo sapiens
  Light chain CDR3 for antibody 12823 (IGKV1-27)
QKYNSAPMYT

SEQ ID NO: 25646 - protein, 15 aa, Homo sapiens
  Heavy chain CDR3 for antibody 12823 (IGHV3-20)
ARDRGSSGWRDWFDP

SEQ ID NO: 25647 - protein, 9 aa, Homo sapiens
  Light chain CDR3 for antibody 12824 (IGKV5-2)
LQHDNFPYT

SEQ ID NO: 25648 - protein, 14 aa, Homo sapiens
  Heavy chain CDR3 for antibody 12824 (IGHV3-33)
ARDGLVGASSWFDP

SEQ ID NO: 25649 - protein, 9 aa, Homo sapiens
  Light chain CDR3 for antibody 12825 (IGKV1-17)
LQHNSYPWT

SEQ ID NO: 25650 - protein, 12 aa, Homo sapiens
  Heavy chain CDR3 for antibody 12825 (IGHV1-24)
ATVLLWFGELDV

SEQ ID NO: 25651 - protein, 9 aa, Homo sapiens
  Light chain CDR3 for antibody 12826 (IGKV1D-13)
QQFNNYPHT

SEQ ID NO: 25652 - protein, 12 aa, Homo sapiens
  Heavy chain CDR3 for antibody 12826 (IGHV3-64)
ARVNSGSPYFDY

SEQ ID NO: 25653 - protein, 9 aa, Homo sapiens
  Light chain CDR3 for antibody 12827 (IGKV1-16)
QHYNDYPFT

SEQ ID NO: 25654 - protein, 13 aa, Homo sapiens
  Heavy chain CDR3 for antibody 12827 (IGHV4-39)
ARHEVMVRGVFDY

SEQ ID NO: 25655 - protein, 9 aa, Homo sapiens
  Light chain CDR3 for antibody 12828 (IGKV1-17)
LQLNSFPWT

SEQ ID NO: 25656 - protein, 14 aa, Homo sapiens
  Heavy chain CDR3 for antibody 12828 (IGHV3-33)
ARGAAAGNFYGLDV

SEQ ID NO: 25657 - protein, 11 aa, Homo sapiens
  Light chain CDR3 for antibody 12829 (IGKV3-11)
QQRSNWPPTWT

SEQ ID NO: 25658 - protein, 10 aa, Homo sapiens
  Heavy chain CDR3 for antibody 12829 (IGHV3-23)
AKGDRWRFDP

SEQ ID NO: 25659 - protein, 9 aa, Homo sapiens
  Light chain CDR3 for antibody 12830 (IGKV3-11)
QQRSNWPPT

SEQ ID NO: 25660 - protein, 21 aa, Homo sapiens
  Heavy chain CDR3 for antibody 12830 (IGHV3-33)
ARDEYYEIVTGYGYYHYGMDV

SEQ ID NO: 25661 - protein, 9 aa, Homo sapiens
  Light chain CDR3 for antibody 12831 (IGKV2D-24)
TQATQFPHT

SEQ ID NO: 25662 - protein, 15 aa, Homo sapiens
  Heavy chain CDR3 for antibody 12831 (IGHV3-33)
ARDSRPEIIGPPFDY

SEQ ID NO: 25663 - protein, 9 aa, Homo sapiens
  Light chain CDR3 for antibody 12832 (IGKV1-17)
LQHNSYPYT

SEQ ID NO: 25664 - protein, 19 aa, Homo sapiens
  Heavy chain CDR3 for antibody 12832 (IGHV3-74)
AGTYPTFYDGSGNYYDFDY

SEQ ID NO: 25665 - protein, 9 aa, Homo sapiens
  Light chain CDR3 for antibody 12833 (IGKV1-9)
QQVKSYPYT

SEQ ID NO: 25666 - protein, 6 aa, Homo sapiens
  Heavy chain CDR3 for antibody 12833 (IGHV1-46)
AREGTY

SEQ ID NO: 25667 - protein, 9 aa, Homo sapiens
  Light chain CDR3 for antibody 12834 (IGKV1-6)
LQDFHYPWT

SEQ ID NO: 25668 - protein, 18 aa, Homo sapiens
  Heavy chain CDR3 for antibody 12834 (IGHV3-23)
AKEGNYYGSGSYWGYFDP

SEQ ID NO: 25669 - protein, 9 aa, Homo sapiens
  Light chain CDR3 for antibody 12835 (IGKV2D-28)
MQALQTPPT

SEQ ID NO: 25670 - protein, 13 aa, Homo sapiens
  Heavy chain CDR3 for antibody 12835 (IGHV3-33)
AKEDGDYHHYFDY

SEQ ID NO: 25671 - protein, 10 aa, Homo sapiens
  Light chain CDR3 for antibody 12836 (IGKV3-20)
QQYGSSPPYT

SEQ ID NO: 25672 - protein, 16 aa, Homo sapiens
  Heavy chain CDR3 for antibody 12836 (IGHV1-8)
ARGHYYGSGSYYNFDY

SEQ ID NO: 25673 - protein, 9 aa, Homo sapiens
  Light chain CDR3 for antibody 12837 (IGKV3-11)
QQRINWPWT

SEQ ID NO: 25674 - protein, 8 aa, Homo sapiens
  Heavy chain CDR3 for antibody 12837 (IGHV4-59)
ARRGGLDY

SEQ ID NO: 25675 - protein, 9 aa, Homo sapiens
  Light chain CDR3 for antibody 12838 (IGKV2-30)
MQGTHWPLT

SEQ ID NO: 25676 - protein, 18 aa, Homo sapiens
  Heavy chain CDR3 for antibody 12838 (IGHV3-23)
AKPDYYGSGSYYNVPFDY

SEQ ID NO: 25677 - protein, 9 aa, Homo sapiens
  Light chain CDR3 for antibody 12839 (IGKV3-15)
QQYNDWPRT

SEQ ID NO: 25678 - protein, 17 aa, Homo sapiens
  Heavy chain CDR3 for antibody 12839 (IGHV3-33)
ARDLIGPLSSSWYPFDY

SEQ ID NO: 25679 - protein, 10 aa, Homo sapiens
  Light chain CDR3 for antibody 12840 (IGKV3-20)
QQYGRSPPVT

SEQ ID NO: 25680 - protein, 8 aa, Homo sapiens
  Heavy chain CDR3 for antibody 12840 (IGHV3-23)
EKSAGEDV

SEQ ID NO: 25681 - protein, 9 aa, Homo sapiens
  Light chain CDR3 for antibody 12841 (IGKV3-20)
QQYGISPYT

SEQ ID NO: 25682 - protein, 18 aa, Homo sapiens
  Heavy chain CDR3 for antibody 12841 (IGHV4-59)
AREGDYVWGSYRSNWFDP

SEQ ID NO: 25683 - protein, 9 aa, Homo sapiens
  Light chain CDR3 for antibody 12842 (IGKV1-9)
QQLHIYPWT

SEQ ID NO: 25684 - protein, 17 aa, Homo sapiens
  Heavy chain CDR3 for antibody 12842 (IGHV3-30)
AREGVRGLIYYYYGMDV

SEQ ID NO: 25685 - protein, 9 aa, Homo sapiens
  Light chain CDR3 for antibody 12843 (IGKV1-5)
QQYNTYSRT

SEQ ID NO: 25686 - protein, 13 aa, Homo sapiens
  Heavy chain CDR3 for antibody 12843 (IGHV3-33)
ARRYRSGWYPFDY

SEQ ID NO: 25687 - protein, 9 aa, Homo sapiens
  Light chain CDR3 for antibody 12844 (IGKV5-2)
LQHDKFPYT

SEQ ID NO: 25688 - protein, 14 aa, Homo sapiens
  Heavy chain CDR3 for antibody 12844 (IGHV3-33)
ARDLNYDILNGGGY

SEQ ID NO: 25689 - protein, 10 aa, Homo sapiens
  Light chain CDR3 for antibody 12845 (IGKV1-39)
QQSYSTPMYT

SEQ ID NO: 25690 - protein, 11 aa, Homo sapiens
  Heavy chain CDR3 for antibody 12845 (IGHV3-33)
ARDRATATLDY

SEQ ID NO: 25691 - protein, 9 aa, Homo sapiens
  Light chain CDR3 for antibody 12846 (IGKV1-16)
QQYNSYPYT

SEQ ID NO: 25692 - protein, 10 aa, Homo sapiens
  Heavy chain CDR3 for antibody 12846 (IGHV3-33)
ARGGLGTFDY

SEQ ID NO: 25693 - protein, 8 aa, Homo sapiens
  Light chain CDR3 for antibody 12847 (IGKV1-5)
QQYNSYYT

SEQ ID NO: 25694 - protein, 16 aa, Homo sapiens
  Heavy chain CDR3 for antibody 12847 (IGHV3-23)
AKEGEGLRYFDWLFNY

SEQ ID NO: 25695 - protein, 9 aa, Homo sapiens
  Light chain CDR3 for antibody 12848 (IGKV1-6)
LQDYNYPWT

SEQ ID NO: 25696 - protein, 17 aa, Homo sapiens
  Heavy chain CDR3 for antibody 12848 (IGHV3-33)
ARRTAAGTGDYYYGMDV

SEQ ID NO: 25697 - protein, 9 aa, Homo sapiens
  Light chain CDR3 for antibody 12849 (IGKV6-21)
HQSTSLPFT

SEQ ID NO: 25698 - protein, 18 aa, Homo sapiens
  Heavy chain CDR3 for antibody 12849 (IGHV4-39)
ARQYYFGSGNYYRGWFDH

SEQ ID NO: 25699 - protein, 9 aa, Homo sapiens
  Light chain CDR3 for antibody 12850 (IGKV1-16)
QHYNDYPFT

SEQ ID NO: 25700 - protein, 13 aa, Homo sapiens
  Heavy chain CDR3 for antibody 12850 (IGHV3-23)
AKDRGLRYYGMDV

SEQ ID NO: 25701 - protein, 8 aa, Homo sapiens
  Light chain CDR3 for antibody 12851 (IGKV3-11)
QQRSNWLT

SEQ ID NO: 25702 - protein, 14 aa, Homo sapiens
  Heavy chain CDR3 for antibody 12851 (IGHV1-8)
ARDQPTVPSGYFDY

SEQ ID NO: 25703 - protein, 9 aa, Homo sapiens
  Light chain CDR3 for antibody 12852 (IGKV1-39)
QQSYSTPIT

SEQ ID NO: 25704 - protein, 13 aa, Homo sapiens
  Heavy chain CDR3 for antibody 12852 (IGHV3-15)
TTDRLLLFGAFDY

SEQ ID NO: 25705 - protein, 9 aa, Homo sapiens
  Light chain CDR3 for antibody 12853 (IGKV1-39)
QQSYRTPLT

SEQ ID NO: 25706 - protein, 12 aa, Homo sapiens
  Heavy chain CDR3 for antibody 12853 (IGHV3-9)
AEDPFLGTSFDY

SEQ ID NO: 25707 - protein, 9 aa, Homo sapiens
  Light chain CDR3 for antibody 12854 (IGKV1-6)
LQGYNYPRS

SEQ ID NO: 25708 - protein, 16 aa, Homo sapiens
  Heavy chain CDR3 for antibody 12854 (IGHV3-23)
AKEGMVLRYFDWLWDY

SEQ ID NO: 25709 - protein, 9 aa, Homo sapiens
  Light chain CDR3 for antibody 12855 (IGKV1-17)
LHSNNYPWT

SEQ ID NO: 25710 - protein, 15 aa, Homo sapiens
  Heavy chain CDR3 for antibody 12855 (IGHV3-33)
VCVLYDYGDYVGFDY

SEQ ID NO: 25711 - protein, 10 aa, Homo sapiens
  Light chain CDR3 for antibody 12856 (IGKV3-15)
QQYNNWPPYT

SEQ ID NO: 25712 - protein, 13 aa, Homo sapiens
  Heavy chain CDR3 for antibody 12856 (IGHV1-46)
ARRQVGYYYGMDV

SEQ ID NO: 25713 - protein, 11 aa, Homo sapiens
  Light chain CDR3 for antibody 12857 (IGKV3-11)
QQRSNWPPTWT

SEQ ID NO: 25714 - protein, 17 aa, Homo sapiens
  Heavy chain CDR3 for antibody 12857 (IGHV3-15)
TTERYPRRYYYYFGMDV

SEQ ID NO: 25715 - protein, 9 aa, Homo sapiens
  Light chain CDR3 for antibody 12858 (IGKV3-20)
QQYGSSPYT

SEQ ID NO: 25716 - protein, 14 aa, Homo sapiens
  Heavy chain CDR3 for antibody 12858 (IGHV3-20)
ARGGSSGWYDWFDP

SEQ ID NO: 25717 - protein, 9 aa, Homo sapiens
  Light chain CDR3 for antibody 12859 (IGKV1-33)
QQYDNLPFT

SEQ ID NO: 25718 - protein, 14 aa, Homo sapiens
  Heavy chain CDR3 for antibody 12859 (IGHV3-64)
ARDHAAGGYSHSDY

SEQ ID NO: 25719 - protein, 9 aa, Homo sapiens
  Light chain CDR3 for antibody 12860 (IGKV1-16)
QKYNSAPHT

SEQ ID NO: 25720 - protein, 17 aa, Homo sapiens
  Heavy chain CDR3 for antibody 12860 (IGHV3-33)
VREGGLLWVGELSLFDY

SEQ ID NO: 25721 - protein, 8 aa, Homo sapiens
  Light chain CDR3 for antibody 12861 (IGKV6-21)
HQSSSLPT

SEQ ID NO: 25722 - protein, 15 aa, Homo sapiens
  Heavy chain CDR3 for antibody 12861 (IGHV3-33)
ARDTGYSSSWNWFDP

SEQ ID NO: 25723 - protein, 9 aa, Homo sapiens
  Light chain CDR3 for antibody 12862 (IGKV6-21)
HQSTSLPFT

SEQ ID NO: 25724 - protein, 13 aa, Homo sapiens
  Heavy chain CDR3 for antibody 12862 (IGHV4-39)
ARRDGSYYGYFGY

SEQ ID NO: 25725 - protein, 9 aa, Homo sapiens
  Light chain CDR3 for antibody 12863 (IGKV1-33)
QQYDNLPFT

SEQ ID NO: 25726 - protein, 13 aa, Homo sapiens
  Heavy chain CDR3 for antibody 12863 (IGHV3-53)
ARSGSYWGYYFDY

SEQ ID NO: 25727 - protein, 9 aa, Homo sapiens
  Light chain CDR3 for antibody 12864 (IGKV3-11)
QQRINWPPT

SEQ ID NO: 25728 - protein, 18 aa, Homo sapiens
  Heavy chain CDR3 for antibody 12864 (IGHV3-33)
ARGGVLYDILTGFYGMDV

SEQ ID NO: 25729 - protein, 9 aa, Homo sapiens
  Light chain CDR3 for antibody 12865 (IGKV1-17)
LQHNSYPYT

SEQ ID NO: 25730 - protein, 18 aa, Homo sapiens
  Heavy chain CDR3 for antibody 12865 (IGHV3-23)
AKDRRTGTTYGYYYGLDV

SEQ ID NO: 25731 - protein, 9 aa, Homo sapiens
  Light chain CDR3 for antibody 12866 (IGKV2D-24)
TQATQFPHT

SEQ ID NO: 25732 - protein, 13 aa, Homo sapiens
  Heavy chain CDR3 for antibody 12866 (IGHV1-18)
ARDEGYSGYVLDN

SEQ ID NO: 25733 - protein, 9 aa, Homo sapiens
  Light chain CDR3 for antibody 12867 (IGKV3-20)
QQYGSSPRT

SEQ ID NO: 25734 - protein, 23 aa, Homo sapiens
  Heavy chain CDR3 for antibody 12867 (IGHV3-30)
ARDGDYFGSGSQRDYHYYYGLDV

SEQ ID NO: 25735 - protein, 9 aa, Homo sapiens
  Light chain CDR3 for antibody 12868 (IGKV1D-16)
QLYGSSPYT

SEQ ID NO: 25736 - protein, 9 aa, Homo sapiens
  Heavy chain CDR3 for antibody 12868 (IGHV4-59)
ARSGSWIYT

SEQ ID NO: 25737 - protein, 11 aa, Homo sapiens
  Light chain CDR3 for antibody 12869 (IGKV3-11)
QQRSNWPPMYT

SEQ ID NO: 25738 - protein, 11 aa, Homo sapiens
  Heavy chain CDR3 for antibody 12869 (IGHV4-59)
ARDRGHYGMDV

SEQ ID NO: 25739 - protein, 9 aa, Homo sapiens
  Light chain CDR3 for antibody 12870 (IGKV1D-16)
QQYITYPYT

SEQ ID NO: 25740 - protein, 18 aa, Homo sapiens
  Heavy chain CDR3 for antibody 12870 (IGHV3-33)
VRDRERYGSGSYPDAFDI

SEQ ID NO: 25741 - protein, 8 aa, Homo sapiens
  Light chain CDR3 for antibody 12871 (IGKV3-11)
LQRGNWPT

SEQ ID NO: 25742 - protein, 14 aa, Homo sapiens
  Heavy chain CDR3 for antibody 12871 (IGHV3-33)
ARAGSGYDRDWFDP

SEQ ID NO: 25743 - protein, 9 aa, Homo sapiens
  Light chain CDR3 for antibody 12872 (IGKV1-17)
LQHTSYPFT

SEQ ID NO: 25744 - protein, 10 aa, Homo sapiens
  Heavy chain CDR3 for antibody 12872 (IGHV1-2)
AKDHYGDYPY

SEQ ID NO: 25745 - protein, 9 aa, Homo sapiens
  Light chain CDR3 for antibody 12873 (IGKV3-15)
QQYNNWPLT

SEQ ID NO: 25746 - protein, 13 aa, Homo sapiens
  Heavy chain CDR3 for antibody 12873 (IGHV4-39)
ARRDGGYYGYCDY

SEQ ID NO: 25747 - protein, 9 aa, Homo sapiens
  Light chain CDR3 for antibody 12874 (IGKV3D-20)
HQYGSSPLT

SEQ ID NO: 25748 - protein, 13 aa, Homo sapiens
  Heavy chain CDR3 for antibody 12874 (IGHV4-39)
ARQGVLAPAAFDH

SEQ ID NO: 25749 - protein, 8 aa, Homo sapiens
  Light chain CDR3 for antibody 12875 (IGKV3-11)
LQRGNWPT

SEQ ID NO: 25750 - protein, 17 aa, Homo sapiens
  Heavy chain CDR3 for antibody 12875 (IGHV3-33)
ARVRGVIEGYYYYGMDV

SEQ ID NO: 25751 - protein, 10 aa, Homo sapiens
  Light chain CDR3 for antibody 12876 (IGKV1-17)
LQHNSYPMYT

SEQ ID NO: 25752 - protein, 8 aa, Homo sapiens
  Heavy chain CDR3 for antibody 12876 (IGHV3-20)
APHWIFDY

SEQ ID NO: 25753 - protein, 9 aa, Homo sapiens
  Light chain CDR3 for antibody 12877 (IGKV3-15)
QQYNDWPLT

SEQ ID NO: 25754 - protein, 14 aa, Homo sapiens
  Heavy chain CDR3 for antibody 12877 (IGHV3-33)
AKSYDILTGEAFDI

SEQ ID NO: 25755 - protein, 9 aa, Homo sapiens
  Light chain CDR3 for antibody 12878 (IGKV6-21)
QQSSNLPHT

SEQ ID NO: 25756 - protein, 13 aa, Homo sapiens
  Heavy chain CDR3 for antibody 12878 (IGHV3-33)
ARDYCGGDCYLDY

SEQ ID NO: 25757 - protein, 9 aa, Homo sapiens
  Light chain CDR3 for antibody 12879 (IGKV3D-7)
QQDSNLPYT

SEQ ID NO: 25758 - protein, 13 aa, Homo sapiens
  Heavy chain CDR3 for antibody 12879 (IGHV4-59)
ANRDYYGYYGMDV

SEQ ID NO: 25759 - protein, 9 aa, Homo sapiens
  Light chain CDR3 for antibody 12880 (IGKV6-21)
QQSSNLPHT

SEQ ID NO: 25760 - protein, 16 aa, Homo sapiens
  Heavy chain CDR3 for antibody 12880 (IGHV3-33)
ARAVYYGSGSSLIMDV

SEQ ID NO: 25761 - protein, 8 aa, Homo sapiens
  Light chain CDR3 for antibody 12881 (IGKV1-6)
QQFNTYPT

SEQ ID NO: 25762 - protein, 12 aa, Homo sapiens
  Heavy chain CDR3 for antibody 12881 (IGHV4-39)
ARHGSGSSYFDY

SEQ ID NO: 25763 - protein, 9 aa, Homo sapiens
  Light chain CDR3 for antibody 12882 (IGKV3D-7)
QQDYTLPLT

SEQ ID NO: 25764 - protein, 13 aa, Homo sapiens
  Heavy chain CDR3 for antibody 12882 (IGHV3-33)
ARTDYYYYYGMDV

SEQ ID NO: 25765 - protein, 8 aa, Homo sapiens
  Light chain CDR3 for antibody 12883 (IGKV3-20)
QQYGSSLT

SEQ ID NO: 25766 - protein, 18 aa, Homo sapiens
  Heavy chain CDR3 for antibody 12883 (IGHV3-33)
ARGGYSSGWDYYYYGMDV

SEQ ID NO: 25767 - protein, 9 aa, Homo sapiens
  Light chain CDR3 for antibody 12884 (IGKV3-11)
QHRGNWPLT

SEQ ID NO: 25768 - protein, 12 aa, Homo sapiens
  Heavy chain CDR3 for antibody 12884 (IGHV3-13)
AREAGIPDAFDI

SEQ ID NO: 25769 - protein, 10 aa, Homo sapiens
  Light chain CDR3 for antibody 12885 (IGKV3-11)
QQRSNWPALA

SEQ ID NO: 25770 - protein, 14 aa, Homo sapiens
  Heavy chain CDR3 for antibody 12885 (IGHV3-20)
ARDGGSTCYDWFDP

SEQ ID NO: 25771 - protein, 9 aa, Homo sapiens
  Light chain CDR3 for antibody 12886 (IGKV1-9)
QQLISYPLT

SEQ ID NO: 25772 - protein, 15 aa, Homo sapiens
  Heavy chain CDR3 for antibody 12886 (IGHV3-33)
ARKRLYDILTGHYDY

SEQ ID NO: 25773 - protein, 9 aa, Homo sapiens
  Light chain CDR3 for antibody 12887 (IGKV3-15)
QQYINWPRT

SEQ ID NO: 25774 - protein, 13 aa, Homo sapiens
  Heavy chain CDR3 for antibody 12887 (IGHV3-33)
ASGYSGYDWYFDL

SEQ ID NO: 25775 - protein, 9 aa, Homo sapiens
  Light chain CDR3 for antibody 12888 (IGKV2D-24)
MQATQFPHT

SEQ ID NO: 25776 - protein, 8 aa, Homo sapiens
  Heavy chain CDR3 for antibody 12888 (IGHV3-23)
AETFLFDY

SEQ ID NO: 25777 - protein, 11 aa, Homo sapiens
  Light chain CDR3 for antibody 12889 (IGKV3-11)
QQRSNWPPTWT

SEQ ID NO: 25778 - protein, 19 aa, Homo sapiens
  Heavy chain CDR3 for antibody 12889 (IGHV5-51)
ARHGEKGKRITMVRGSLDA

SEQ ID NO: 25779 - protein, 10 aa, Homo sapiens
  Light chain CDR3 for antibody 12890 (IGKV3-15)
QQYNNWPPYT

SEQ ID NO: 25780 - protein, 17 aa, Homo sapiens
  Heavy chain CDR3 for antibody 12890 (IGHV4-59)
ARDFLVRGEGSYYGMDV

SEQ ID NO: 25781 - protein, 9 aa, Homo sapiens
  Light chain CDR3 for antibody 12891 (IGKV3-15)
QQYNNWPYT

SEQ ID NO: 25782 - protein, 16 aa, Homo sapiens
  Heavy chain CDR3 for antibody 12891 (IGHV3-33)
ARGGRSDWLYYYGIDV

SEQ ID NO: 25783 - protein, 10 aa, Homo sapiens
  Light chain CDR3 for antibody 12892 (IGKV3-15)
QQYNNWPPYT

SEQ ID NO: 25784 - protein, 14 aa, Homo sapiens
  Heavy chain CDR3 for antibody 12892 (IGHV1-24)
ATWLPLYYYYGMDV

SEQ ID NO: 25785 - protein, 9 aa, Homo sapiens
  Light chain CDR3 for antibody 12893 (IGKV1D-13)
QRFNNYLYT

SEQ ID NO: 25786 - protein, 12 aa, Homo sapiens
  Heavy chain CDR3 for antibody 12893 (IGHV3-13)
ARDRGYSGYFDY

SEQ ID NO: 25787 - protein, 10 aa, Homo sapiens
  Light chain CDR3 for antibody 12894 (IGKV3-11)
QQRSNWPIFT

SEQ ID NO: 25788 - protein, 16 aa, Homo sapiens
  Heavy chain CDR3 for antibody 12894 (IGHV3-33)
ARDKNTDYDILTGFDY

SEQ ID NO: 25789 - protein, 9 aa, Homo sapiens
  Light chain CDR3 for antibody 12895 (IGKV1-16)
QQYNSFPYT

SEQ ID NO: 25790 - protein, 22 aa, Homo sapiens
  Heavy chain CDR3 for antibody 12895 (IGHV3-11)
ARDVRDYDILTGYYNGGNYFDY

SEQ ID NO: 25791 - protein, 8 aa, Homo sapiens
  Light chain CDR3 for antibody 12896 (IGKV3-11)
LQRGNWPT

SEQ ID NO: 25792 - protein, 13 aa, Homo sapiens
  Heavy chain CDR3 for antibody 12896 (IGHV3-33)
ARDPLYSGSYFDY

SEQ ID NO: 25793 - protein, 9 aa, Homo sapiens
  Light chain CDR3 for antibody 12897 (IGKV1-27)
QKYNSAPYT

SEQ ID NO: 25794 - protein, 14 aa, Homo sapiens
  Heavy chain CDR3 for antibody 12897 (IGHV3-33)
AKDRYRGYEGLFDY

SEQ ID NO: 25795 - protein, 10 aa, Homo sapiens
  Light chain CDR3 for antibody 12898 (IGKV3-11)
QQRSTWPTLI

SEQ ID NO: 25796 - protein, 12 aa, Homo sapiens
  Heavy chain CDR3 for antibody 12898 (IGHV3-23)
ARGLTGDHALDI

SEQ ID NO: 25797 - protein, 8 aa, Homo sapiens
  Light chain CDR3 for antibody 12899 (IGKV3D-7)
QQDYNLLT

SEQ ID NO: 25798 - protein, 16 aa, Homo sapiens
  Heavy chain CDR3 for antibody 12899 (IGHV3-13)
ARDRSYESYYYYGMDV

SEQ ID NO: 25799 - protein, 8 aa, Homo sapiens
  Light chain CDR3 for antibody 12900 (IGKV6-21)
HQSSSLPT

SEQ ID NO: 25800 - protein, 15 aa, Homo sapiens
  Heavy chain CDR3 for antibody 12900 (IGHV3-33)
ARRGYNDYDPYGMDV

SEQ ID NO: 25801 - protein, 9 aa, Homo sapiens
  Light chain CDR3 for antibody 12901 (IGKV1-6)
LQDYNYPYT

SEQ ID NO: 25802 - protein, 13 aa, Homo sapiens
  Heavy chain CDR3 for antibody 12901 (IGHV4-61)
ARMGREQWLGFDY

SEQ ID NO: 25803 - protein, 8 aa, Homo sapiens
  Light chain CDR3 for antibody 12902 (IGKV3D-7)
QQDYNLLT

SEQ ID NO: 25804 - protein, 9 aa, Homo sapiens
  Heavy chain CDR3 for antibody 12902 (IGHV1-18)
ARGGWGFEY

SEQ ID NO: 25805 - protein, 10 aa, Homo sapiens
  Light chain CDR3 for antibody 12903 (IGKV1-17)
LQHNSYPMYT

SEQ ID NO: 25806 - protein, 14 aa, Homo sapiens
  Heavy chain CDR3 for antibody 12903 (IGHV3-33)
VRDAMGATTAWFDP

SEQ ID NO: 25807 - protein, 10 aa, Homo sapiens
  Light chain CDR3 for antibody 12904 (IGKV1-9)
QQLNSFLMYT

SEQ ID NO: 25808 - protein, 11 aa, Homo sapiens
  Heavy chain CDR3 for antibody 12904 (IGHV3-33)
ARDRSSGPFDY

SEQ ID NO: 25809 - protein, 10 aa, Homo sapiens
  Light chain CDR3 for antibody 12905 (IGKV1-6)
LQDYNYPMYT

SEQ ID NO: 25810 - protein, 11 aa, Homo sapiens
  Heavy chain CDR3 for antibody 12905 (IGHV3-23)
AKGLWSYYFDY

SEQ ID NO: 25811 - protein, 9 aa, Homo sapiens
  Light chain CDR3 for antibody 12906 (IGKV3-15)
QQYNNWPYT

SEQ ID NO: 25812 - protein, 16 aa, Homo sapiens
  Heavy chain CDR3 for antibody 12906 (IGHV3-30)
ARDIAVAGHVYYGMDV

SEQ ID NO: 25813 - protein, 9 aa, Homo sapiens
  Light chain CDR3 for antibody 12907 (IGKV3D-7)
QQDYEFPIT

SEQ ID NO: 25814 - protein, 10 aa, Homo sapiens
  Heavy chain CDR3 for antibody 12907 (IGHV3-23)
AKGDRWRFDP

SEQ ID NO: 25815 - protein, 9 aa, Homo sapiens
  Light chain CDR3 for antibody 12908 (IGKV2-30)
MQGTHWPLT

SEQ ID NO: 25816 - protein, 18 aa, Homo sapiens
  Heavy chain CDR3 for antibody 12908 (IGHV3-23)
AKVGDFFASGNYWDYFDY

SEQ ID NO: 25817 - protein, 8 aa, Homo sapiens
  Light chain CDR3 for antibody 12909 (IGKV3-11)
LQRGNWPT

SEQ ID NO: 25818 - protein, 11 aa, Homo sapiens
  Heavy chain CDR3 for antibody 12909 (IGHV3-15)
ARDRGNWGFDY

SEQ ID NO: 25819 - protein, 9 aa, Homo sapiens
  Light chain CDR3 for antibody 12910 (IGKV3-20)
QQYGSSPYT

SEQ ID NO: 25820 - protein, 15 aa, Homo sapiens
  Heavy chain CDR3 for antibody 12910 (IGHV3-33)
ARRGGIAAAGYYFDY

SEQ ID NO: 25821 - protein, 9 aa, Homo sapiens
  Light chain CDR3 for antibody 12911 (IGKV1-9)
QQLKSYLYT

SEQ ID NO: 25822 - protein, 16 aa, Homo sapiens
  Heavy chain CDR3 for antibody 12911 (IGHV3-33)
ARDNFGSGSYYSHFHY

SEQ ID NO: 25823 - protein, 9 aa, Homo sapiens
  Light chain CDR3 for antibody 12912 (IGKV3-11)
QQRINWPWT

SEQ ID NO: 25824 - protein, 19 aa, Homo sapiens
  Heavy chain CDR3 for antibody 12912 (IGHV5-51)
ARHGEKGKRITMVRGSLDV

SEQ ID NO: 25825 - protein, 8 aa, Homo sapiens
  Light chain CDR3 for antibody 12913 (IGKV1D-13)
QQFNNYPT

SEQ ID NO: 25826 - protein, 19 aa, Homo sapiens
  Heavy chain CDR3 for antibody 12913 (IGHV3-33)
AREDYYGSGSYYNEDWFDP

SEQ ID NO: 25827 - protein, 8 aa, Homo sapiens
  Light chain CDR3 for antibody 12914 (IGKV3D-7)
QQDYNLLT

SEQ ID NO: 25828 - protein, 14 aa, Homo sapiens
  Heavy chain CDR3 for antibody 12914 (IGHV3-33)
ARTTAAAGPRDFQH

SEQ ID NO: 25829 - protein, 9 aa, Homo sapiens
  Light chain CDR3 for antibody 12915 (IGKV1-6)
LQDYNHPWT

SEQ ID NO: 25830 - protein, 9 aa, Homo sapiens
  Heavy chain CDR3 for antibody 12915 (IGHV3-30)
VRDNWGFDY

SEQ ID NO: 25831 - protein, 8 aa, Homo sapiens
  Light chain CDR3 for antibody 12916 (IGKV6-21)
HQSSSLPT

SEQ ID NO: 25832 - protein, 10 aa, Homo sapiens
  Heavy chain CDR3 for antibody 12916 (IGHV4-34)
ARDLGWSFDH

SEQ ID NO: 25833 - protein, 10 aa, Homo sapiens
  Light chain CDR3 for antibody 12917 (IGKV1-9)
QQLDSYPMYT

SEQ ID NO: 25834 - protein, 11 aa, Homo sapiens
  Heavy chain CDR3 for antibody 12917 (IGHV3-33)
ARDTWDDYFDY

SEQ ID NO: 25835 - protein, 8 aa, Homo sapiens
  Light chain CDR3 for antibody 12918 (IGKV2D-28)
MQALQTPT

SEQ ID NO: 25836 - protein, 13 aa, Homo sapiens
  Heavy chain CDR3 for antibody 12918 (IGHV3-33)
ARDWGYSHGYFDY

SEQ ID NO: 25837 - protein, 10 aa, Homo sapiens
  Light chain CDR3 for antibody 12919 (IGKV3-11)
QQRSNWPIFT

SEQ ID NO: 25838 - protein, 12 aa, Homo sapiens
  Heavy chain CDR3 for antibody 12919 (IGHV1-18)
AGVLFDGDYSDY

SEQ ID NO: 25839 - protein, 8 aa, Homo sapiens
  misc_feature (5)..(8): Xaa can be any naturally occurring amino acid
GFTFXXXX

SEQ ID NO: 25840 - protein, 8 aa, Homo sapiens
  misc_feature (5)..(5): Xaa can be Ser or Asp
  misc_feature (6)..(6): Xaa can be Ser or Asp
  misc_feature (7)..(7): Xaa can be Tyr or His or Asp
  misc_feature (8)..(8): Xaa can be Ala or Gly or Tyr or Phe
GFTFXXXX

SEQ ID NO: 25841 - protein, 8 aa, Homo sapiens
GFTFSSYA

SEQ ID NO: 25842 - protein, 8 aa, Homo sapiens
GFTFSSYG

SEQ ID NO: 25843 - protein, 8 aa, Homo sapiens
  misc_feature (7)..(7): Xaa can be Tyr or His
GFTFDDXG

SEQ ID NO: 25844 - protein, 8 aa, Homo sapiens
  misc_feature (7)..(7): Xaa can be Tyr or Asp
  misc_feature (8)..(8): Xaa can be Tyr or Phe
GFTFSDXX

SEQ ID NO: 25845 - protein, 8 aa, Homo sapiens
  misc_feature (2)..(4): Xaa can be any naturally occurring amino acid
  misc_feature (6)..(8): Xaa can be any naturally occurring amino acid
IXXXGXXX

SEQ ID NO: 25846 - protein, 8 aa, Homo sapiens
  misc_feature (2)..(2): Xaa can be Trp or Ser or Asn
  misc_feature (3)..(3): Xaa can be Gly or Tyr or Trp
  misc_feature (4)..(4): Xaa can be Ser or Asp or Asn
  misc_feature (6)..(6): Xaa can be Gly or Ser or Asp or Tyr
  misc_feature (7)..(7): Xaa can be Ser or Asn or Thr
  misc_feature (8)..(8): Xaa can be Thr or Lys or Ile
IXXXGXXX

SEQ ID NO: 25847 - protein, 8 aa, Homo sapiens
ISGSGGST

SEQ ID NO: 25848 - protein, 8 aa, Homo sapiens
  misc_feature (2)..(2): Xaa can be Trp or Ser
IXYDGSNK

SEQ ID NO: 25849 - protein, 8 aa, Homo sapiens
  misc_feature (6)..(6): Xaa can be Gly or Asp
INWNGXST

SEQ ID NO: 25850 - protein, 8 aa, Homo sapiens
  misc_feature (6)..(6): Xaa can be Ser or Tyr
ISGSGXTI

SEQ ID NO: 25851 - protein, 16 aa, Homo sapiens
AKEGMVLRYFDWLWDY

SEQ ID NO: 25852 - protein, 12 aa, Homo sapiens
  misc_feature (2)..(4): Xaa can be any naturally occurring amino acid
  misc_feature (7)..(7): Xaa can be any naturally occurring amino acid
  misc_feature (9)..(9): Xaa can be any naturally occurring amino acid
RXXXSGXSXFDY

SEQ ID NO: 25853 - protein, 12 aa, Homo sapiens
  misc_feature (2)..(7): Xaa can be any naturally occurring amino acid
  misc_feature (9)..(11): Xaa can be any naturally occurring amino acid
AXXXXXXVXXXY

SEQ ID NO: 25854 - protein, 15 aa, Homo sapiens
  misc_feature (3)..(4): Xaa can be any naturally occurring amino acid
  misc_feature (7)..(10): Xaa can be any naturally occurring amino acid
  misc_feature (12)..(12): Xaa can be any naturally occurring amino acid
  misc_feature (15)..(15): Xaa can be any naturally occurring amino acid
ARXXGSXXXXDXFDX

SEQ ID NO: 25855 - protein, 13 aa, Homo sapiens
  misc_feature (7)..(7): Xaa can be any naturally occurring amino acid
  misc_feature (10)..(10): Xaa can be any naturally occurring amino acid
  misc_feature (13)..(13): Xaa can be any naturally occurring amino acid
ARDEGYXGYXLDX

SEQ ID NO: 25856 - protein, 16 aa, Homo sapiens
AKEGMVLRYFDWLWDY

SEQ ID NO: 25857 - protein, 12 aa, Homo sapiens
  misc_feature (2)..(2): Xaa can be Asp or Glu
  misc_feature (3)..(3): Xaa can be Arg or Leu
  misc_feature (4)..(4): Xaa can be Ser or Val or Leu
  misc_feature (7)..(7): Xaa can be Pro or Trp
  misc_feature (9)..(9): Xaa can be Gly or His
RXXXSGXSXFDY

SEQ ID NO: 25858 - protein, 12 aa, Homo sapiens
  misc_feature (2)..(2): Xaa can be Lys or Glu or Arg
  misc_feature (3)..(3): Xaa can be Glu or Thr
  misc_feature (4)..(4): Xaa can be Gln or Leu or Thr
  misc_feature (5)..(5): Xaa can be Leu or Trp or Ile
  misc_feature (6)..(6): Xaa can be Leu or Val or Trp or Asn
  misc_feature (7)..(7): Xaa can be Gly or Leu
  misc_feature (9)..(9): Xaa can be Val or Pro or Leu
  misc_feature (10)..(10): Xaa can be Phe or Leu or Asn
  misc_feature (11)..(11): Xaa can be Asp or Asn
AXXXXXXVXXXY

SEQ ID NO: 25859 - protein, 15 aa, Homo sapiens
  misc_feature (3)..(3): Xaa can be Asp or Asn
  misc_feature (4)..(4): Xaa can be Arg or Gly
  misc_feature (7)..(7): Xaa can be Ser or Thr
  misc_feature (8)..(8): Xaa can be Gly or Ser or Trp or Phe
  misc_feature (9)..(9): Xaa can be Trp or Phe or Tyr
  misc_feature (10)..(10): Xaa can be Arg or Phe or Tyr
  misc_feature (12)..(12): Xaa can be Trp or Ala
  misc_feature (15)..(15): Xaa can be Pro or Ile
ARXXGSXXXXDXFDX

SEQ ID NO: 25860 - protein, 13 aa, Homo sapiens
  misc_feature (7)..(7): Xaa can be Arg or Ser
  misc_feature (10)..(10): Xaa can be Val or Asn
  misc_feature (13)..(13): Xaa can be Thr or Asn or Ser
ARDEGYXGYXLDX
